(19) United States
(12) Patent Application Publication
(10) Pub. No.: US 2005/0266423 A1
(43) Pub. Date: Dec. 1, 2005

(54) Novel nucleic acids and polypeptides

(75) Inventors: Y. Tom Tang, San Jose, CA (US); Chenghua Liu, San Jose, CA (US); Vinod Asundi, Foster City, CA (US); Rui-hong Chen, Foster City, CA (US); Xiaohong B. Qian, San Jose, CA (US); Zhi Wei Wang, Athens, GA (US); Tom Wehrman, Stanford, CA (US); Jie Zhang, Campbell, CA (US); Ping Zhou, Cupertino, CA (US); Yicheng Cao, Guang Zhou City (CN); Radoje T. Drmanac, Los Altos Hills, CA (US)

Correspondence Address: NUVELO, INC, 675 ALMANOR AVE., SUNNYVALE, CA, 94085, US

(73) Assignee: NUVELO, Inc., Sunnyvale, CA (US)

(21) Appl. No.: 11/000,463

(22) Filed: Nov. 29, 2004

Related U.S. Application Data
(63) Continuation of application No. 10/291,265, filed on Nov. 8, 2002, now abandoned.
Application No. 10/291,265 is a continuation-in-part of application No. PCT/US01/02623, filed on Jan. 25, 2001.
Application No. 10/291,265 is a continuation-in-part of application No. 09/922,279, filed on Aug. 3, 2001, now abandoned.
Application No. 10/291,265 is a continuation-in-part of application No. 09/617,746, filed on Jul. 17, 2000, now abandoned.
Application No. 10/291,265 is a continuation-in-part of application No. 09/631,451, filed on Aug. 3, 2000, now abandoned.
Application No. 10/291,265 is a continuation-in-part of application No. 09/663,870, filed on Sep. 15, 2000, now abandoned.
Application No. 09/922,279 is a continuation of application No. 09/491,404, filed on Jan. 25, 2000, now abandoned.

(51) Int. Cl. C12Q 1/68; C07H 21/04; C12P 21/06; C07K 14/47

(52) U.S. Cl. 435/6; 435/69.1; 435/320.1; 435/325; 530/350; 536/23.2

(57) ABSTRACT

The present invention provides novel nucleic acids, novel polypeptide sequences encoded by these nucleic acids and uses thereof.

[0001] This application is a continuation-in-part of each of PCT/US01/02623 filed Jan. 25, 2001, Docket No. 785CIP3/PCT; U.S. application Ser. No. 09/922,279 filed Aug. 3, 2001, Docket No. 785CON, now abandoned, which is a continuation of U.S. application Ser. No. 09/491,404 filed Jan. 25, 2000, Docket No. 785, now abandoned; U.S. application Ser. No. 09/617,746 filed Jul. 17, 2000, Docket No. 785CIP2A, now abandoned; U.S. application Ser. No. 09/631,451 filed Aug. 3, 2000, Docket No. 785CIP2B; U.S. application Ser. No. 09/663,870 filed Sep. 15, 2000, Docket No. 785CIP2C, all of which are incorporated herein by reference in their entirety, specifically including, but not limited to, incorporation by reference of the tables in each application displaying sequence information, homology information, ematrix signatures, pfam signatures, signal peptide information, transmembrane domain information, chromosomal localization and tissue distribution information, and/or 3-dimensional structural information.

### 1. TECHNICAL FIELD

[0002] The present invention provides novel polynucleotides and proteins encoded by such polynucleotides, along with uses for these polynucleotides and proteins, for example in therapeutic, diagnostic and research methods.

### 2. BACKGROUND

[0003] Technology aimed at the discovery of protein factors (including e.g., cytokines, such as lymphokines, interferons, circulating soluble factors, chemokines, and interleukins) has matured rapidly over the past decade. The now routine hybridization cloning and expression cloning techniques clone novel polynucleotides “directly” in the sense that they rely on information directly related to the discovered protein (i.e., partial DNA/amino acid sequence of the protein in the case of hybridization cloning; activity of the protein in the case of expression cloning). More recent “indirect” cloning techniques such as signal sequence cloning, which isolates DNA sequences based on the presence of a now well-recognized secretory leader sequence motif, as well as various PCR-based or low stringency hybridization-based cloning techniques, have advanced the state of the art by making available large numbers of DNA/amino acid sequences for proteins that are known to have biological activity, for example, by virtue of their secreted nature in the case of leader sequence cloning, by virtue of their cell or tissue source in the case of PCR-based techniques, or by virtue of structural similarity to other genes of known biological activity.

[0004] Identified polynucleotide and polypeptide sequences have numerous applications in, for example, diagnostics, forensics, gene mapping; identification of mutations responsible for genetic disorders or other traits, to assess biodiversity, and to produce many other types of data and products dependent on DNA and amino acid sequences.

### 3. SUMMARY OF THE INVENTION

[0005] The compositions of the present invention include novel isolated polypeptides, novel isolated polynucleotides encoding such polypeptides, including recombinant DNA molecules, cloned genes or degenerate variants thereof, especially naturally occurring variants such as allelic variants, antisense polynucleotide molecules, and antibodies that specifically recognize one or more epitopes present on such polypeptides, as well as hybridomas producing such antibodies.

[0006] The present invention relates to a collection or library of at least one novel nucleic acid sequence assembled from expressed sequence tags (ESTs) isolated mainly by sequencing by hybridization (SBH), and in some cases, sequences obtained from one or more public databases. The invention relates also to the proteins encoded by such polynucleotides, along with therapeutic, diagnostic and research utilities for these polynucleotides and proteins. These nucleic acid sequences are designated as SEQ ID NO: 1-236 and 473-708. The polypeptides sequences are designated SEQ ID NO: 237-472 and 709-944. The nucleic acids and polypeptides are provided in the Sequence Listing. In the nucleic acids provided in the Sequence Listing, A is adenosine; C is cytosine; G is guanine; T is thyrnine; and N is any of the four bases. In the amino acids provided in the Sequence Listing, * corresponds to the stop codon.

[0007] The nucleic acid sequences of the present invention also include, nucleic acid sequences that hybridize to the complement of SEQ ID NO: 1-236 and 473-708 under stringent hybridization conditions; nucleic acid sequences which are allelic variants or species homologues of any of the nucleic acid sequences recited above, or nucleic acid sequences that encode a peptide comprising a specific domain or truncation of the peptides encoded by SEQ ID NO: 1-236 and 473-708. A polynucleotide comprising a nucleotide sequence having at least 90% identity to an identifying sequence of SEQ ID NO: 1-236 and 473-708 or a degenerate variant or fragment thereof. The identifying sequence can be 100 base pairs in length.

[0008] The nucleic acid sequences of the present invention also include the sequence information from the nucleic acid sequences of SEQ ID NO: 1-236 and 473-708. The sequence information can be a segment of any one of SEQ ID NO: 1-236 and 473-708 that uniquely identifies or represents the sequence information of SEQ ID NO: 1-236 and 473-708.

[0009] A collection as used in this application can be a collection of only one polynucleotide. The collection of sequence information or identifying information of each sequence can be provided on a nucleic acid array. In one embodiment, segments of sequence information is provided on a nucleic acid array to detect the polynucleotide that contains the segment. The array can be designed to detect full-match or mismatch to the polynucleotide that contains the segment. The collection can also be provided in a computer-readable format.

[0010] This invention also includes the reverse or direct complement of any of the nucleic acid sequences recited above; cloning or expression vectors containing the nucleic acid sequences; and host cells or organisms transformed with these expression vectors. Nucleic acid sequences (or their reverse or direct complements) according to the invention have numerous applications in a variety of techniques known to those skilled in the art of molecular biology, such as use as hybridization probes, use as primers for PCR, use in an array, use in computer-readable media, use in sequencing full-length genes, use for chromosome and gene mapping, use in the recombinant production of protein, and use in the generation of anti-sense DNA or RNA, their chemical analogs and the like.

[0011] In a preferred embodiment, the nucleic acid sequences of SEQ ID NO: 1-236 and 473-708 or novel segments or parts of the nucleic acids of the invention are used as primers in expression assays that are well known in the art. In a particularly preferred embodiment, the nucleic acid sequences of SEQ ID NO: 1-236 and 473-708 or novel segments or parts of the nucleic acids provided herein are used in diagnostics for identifying expressed genes or, as well known in the art and exemplified by Vollrath et al., Science 258:52-59 (1992), as expressed sequence tags for physical mapping of the human genome.

[0012] The isolated polynucleotides of the invention include, but are not limited to, a polynucleotide comprising any one of the nucleotide sequences set forth in SEQ ID NO: 1-236 and 473-708; a polynucleotide comprising any of the full length protein coding sequences of SEQ ID NO: 1-236 and 473-708; and a polynucleotide comprising any of the nucleotide sequences of the mature protein coding sequences of SEQ ID NO: 1-236 and 473-708. The polynucleotides of the present invention also include, but are not limited to, a polynucleotide that hybridizes under stringent hybridization conditions to (a) the complement of any one of the nucleotide sequences set forth in SEQ ID NO: 1-236 and 473-708; (b) a nucleotide sequence encoding any one of the amino acid sequences set forth in the Sequence Listing; (c) a polynucleotide which is an allelic variant of any polynucleotides recited above; (d) a polynucleotide which encodes a species homolog (e.g. orthologs) of any of the proteins recited above; or (e) a polynucleotide that encodes a polypeptide comprising a specific domain or truncation of any of the polypeptides comprising an amino acid sequence set forth in the Sequence Listing.

[0013] The isolated polypeptides of the invention include, but are not limited to, a polypeptide comprising any of the amino acid sequences set forth in SEQ ID NO:237- 472 or 709-944; or the corresponding full length or mature protein. Polypeptides of the invention also include polypeptides with biological activity that are encoded by (a) any of the polynucleotides having a nucleotide sequence set forth in SEQ ID NO: 1-236 and 473-708; or (b) polynucleotides that hybridize to the complement of the polynucleotides of (a) under stringent hybridization conditions. Biologically or immunologically active variants of any of the polypeptide sequences in the Sequence Listing, and “substantial equivalents” thereof (e.g., with at least about 65%, 70%, 75%, 80%, 85%, 90%, 95%, 98% or 99% amino acid sequence identity) that preferably retain biological activity are also contemplated. The polypeptides of the invention may be wholly or partially chemically synthesized but are preferably produced by recombinant means using the genetically engineered cells (e.g. host cells) of the invention.

[0014] The invention also provides compositions comprising a polypeptide of the invention. Polypeptide compositions of the invention may further comprise an acceptable carrier, such as a hydrophilic, e.g., pharmaceutically acceptable, carrier.

[0015] The invention also provides host cells transformed or transfected with a polynucleotide of the invention.

[0016] The invention also relates to methods for producing a polypeptide of the invention comprising growing a culture of the host cells of the invention in a suitable culture medium under conditions permitting expression of the desired polypeptide, and purifying the polypeptide from the culture or from the host cells. Preferred embodiments include those in which the protein produced by such process is a mature form of the protein.

[0017] Polynucleotides according to the invention have numerous applications in a variety of techniques known to those skilled in the art of molecular biology. These techniques include use as hybridization probes, use as oligomers, or primers, for PCR, use for chromosome and gene mapping, use in the recombinant production of protein, and use in generation of anti-sense DNA or RNA, their chemical analogs and the like. For example, when the expression of an mRNA is largely restricted to a particular cell or tissue type, polynucleotides of the invention can be used as hybridization probes to detect the presence of the particular cell or tissue mRNA in a sample using, e.g., in situ hybridization.

[0018] In other exemplary embodiments, the polynucleotides are used in diagnostics as expressed sequence tags for identifying expressed genes or, as well known in the art and exemplified by Vollrath et al., Science 258:52-59 (1992), as expressed sequence tags for physical mapping of the human genome.

[0019] The polypeptides according to the invention can be used in a variety of conventional procedures and methods that are currently applied to other proteins. For example, a polypeptide of the invention can be used to generate an antibody that specifically binds the polypeptide. Such antibodies, particularly monoclonal antibodies, are useful for detecting or quantitating the polypeptide in tissue. The polypeptides of the invention can also be used as molecular weight markers, and as a food supplement.

[0020] Methods are also provided for preventing, treating, or ameliorating a medical condition which comprises the step of administering to a mammalian subject a therapeutically effective amount of a composition comprising a polypeptide of the present invention and a pharmaceutically acceptable carrier.

[0021] In particular, the polypeptides and polynucleotides of the invention can be utilized, for example, in methods for the prevention and/or treatment of disorders involving aberrant protein expression or biological activity.

[0022] The present invention further relates to methods for detecting the presence of the polynucleotides or polypeptides of the invention in a sample. Such methods can, for example, be utilized as part of prognostic and diagnostic evaluation of disorders as recited herein and for the identification of subjects exhibiting a predisposition to such conditions. The invention provides a method for detecting the polynucleotides of the invention in a sample, comprising contacting the sample with a compound that binds to and forms a complex with the polynucleotide of interest for a period sufficient to form the complex and under conditions sufficient to form a complex and detecting the complex such that if a complex is detected, the polynucleotide of interest is detected. The invention also provides a method for detecting the polypeptides of the invention in a sample comprising contacting the sample with a compound that binds to and forms a complex with the polypeptide under conditions and for a period sufficient to form the complex and detecting the formation of the complex such that if a complex is formed, the polypeptide is detected.

[0023] The invention also provides kits comprising polynucleotide probes and/or monoclonal antibodies, and optionally quantitative standards, for carrying out methods of the invention. Furthermore, the invention provides methods for evaluating the efficacy of drugs, and monitoring the progress of patients, involved in clinical trials for the treatment of disorders as recited above.

[0024] The invention also provides methods for the identification of compounds that modulate (i.e., increase or decrease) the expression or activity of the polynucleotides and/or polypeptides of the invention. Such methods can be utilized, for example, for the identification of compounds that can ameliorate symptoms of disorders as recited herein. Such methods can include, but are not limited to, assays for identifying compounds and other substances that interact with (e.g., bind to) the polypeptides of the invention. The invention provides a method for identifying a compound that binds to the polypeptides of the invention comprising contacting the compound with a polypeptide of the invention in a cell for a time sufficient to form a polypeptide/compound complex, wherein the complex drives expression of a reporter gene sequence in the cell; and detecting the complex by detecting the reporter gene sequence expression such that if expression of the reporter gene is detected the compound the binds to a polypeptide of the invention is identified.

[0025] The methods of the invention also provides methods for treatment which involve the administration of the polynucleotides or polypeptides of the invention to individuals exhibiting symptoms or tendencies. In addition, the invention encompasses methods for treating diseases or disorders as recited herein comprising administering compounds and other substances that modulate the overall activity of the target gene products. Compounds and other substances can effect such modulation either on the level of target gene/protein expression or target protein activity.

[0026] The polypeptides of the present invention and the polynucleotides encoding them are also useful for the same functions known to one of skill in the art as the polypeptides and polynucleotides to which they have homology (set forth in Table 2); for which they have a signature region (as set forth in Table 3); or for which they have homology to a gene family (as set forth in Table 4). If no homology is set forth for a sequence, then the polypeptides and polynucleotides of the present invention are useful for a variety of applications, as described herein, including use in arrays for detection.

[0027] 4. DETAILED DESCRIPTION OF THE INVENTION

[0028] 4.1 Definitions.

[0029] It must be noted that as used herein and in the appended claims, the singular forms “a”, “an” and “the” include plural references unless the context clearly dictates otherwise.

[0030] The term “active” refers to those forms of the polypeptide which retain the biologic and/or immunologic activities of any naturally occurring polypeptide. According to the invention, the terms “biologically active” or “biological activity” refer to a protein or peptide having structural, regulatory or biochemical functions of a naturally occurring molecule. Likewise “immunologically active” or “immunological activity” refers to the capability of the natural, recombinant or synthetic polypeptide to induce a specific immune response in appropriate animals or cells and to bind with specific antibodies.

[0031] The term “activated cells” as used in this application are those cells which are engaged in extracellular or intracellular membrane trafficking, including the export of secretory or enzymatic molecules as part of a normal or disease process.

[0032] The terms “complementary” or “complementarity” refer to the natural binding of polynucleotides by base pairing. For example, the sequence 5′-AGT-3′ binds to the complementary sequence 3′-TCA-5′. Complementarity between two single-stranded molecules may be “partial” such that only some of the nucleic acids bind or it may be “complete” such that total complementarity exists between the single stranded molecules. The degree of complementarity between the nucleic acid strands has significant effects on the efficiency and strength of the hybridization between the nucleic acid strands.

[0033] The term “embryonic stem cells (ES)” refers to a cell that can give rise to many differentiated cell types in an embryo or an adult, including the germ cells. The term “germ line stem cells (GSCs)” refers to stem cells derived from primordial stem cells that provide a steady and continuous source of germ cells for the production of gametes. The term “primordial germ cells (PGCs)” refers to a small population of cells set aside from other cell lineages particularly from the yolk sac, mesenteries, or gonadal ridges during embryo genesis that have the potential to differentiate into germ cells and other cells. PGCs are the source from which GSCs and ES cells are derived The PGCs, the GSCs and the ES cells are capable of self-renewal. Thus these cells not only populate the germ line and give rise to a plurality of terminally differentiated cells that comprise the adult specialized organs, but are able to regenerate themselves.

[0034] The term “expression modulating fragment,” EMF, means a series of nucleotides which modulates the expression of an operably linked ORF or another EMF.

[0035] As used herein, a sequence is said to “modulate the expression of an operably linked sequence” when the expression of the sequence is altered by the presence of the EMF. EMFs include, but are not limited to, promoters, and promoter modulating sequences (inducible elements). One class of EMFs are nucleic acid fragments which induce the expression of an operably linked ORF in response to a specific regulatory factor or physiological event.

[0036] The terms “nucleotide sequence” or “nucleic acid” or “polynucleotide” or “oligonculeotide” are used interchangeably and refer to a heteropolymer of nucleotides or the sequence of these nucleotides. These phrases also refer to DNA or RNA of genomic or synthetic origin which may be single-stranded or double-stranded and may represent the sense or the antisense strand, to peptide nucleic acid (PNA) or to any DNA-like or RNA-like material. In the sequences herein A is adenine, C is cytosine, T is thymine, G is guanine and N is A, C, G or T (U). It is contemplated that where the polynucleotide is RNA, the T (thymine) in the sequences provided herein is substituted with U (uracil). Generally, nucleic acid segments provided by this invention may be assembled from fragments of the genome and short oligonucleotide linkers, or from a series of oligonucleotides, or from individual nucleotides, to provide a synthetic nucleic acid which is capable of being expressed in a recombinant transcriptional unit comprising regulatory elements derived from a microbial or viral operon, or a eukaryotic gene.

[0037] The terms “oligonucleotide fragment” or a “polynucleotide fragment”, “portion,” or “segment” or “probe” or “primer” are used interchangeably and refer to a sequence of nucleotide residues which are at least about 5 nucleotides, more preferably at least about 7 nucleotides, more preferably at least about 9 nucleotides, more preferably at least about 11 nucleotides and most preferably at least about 17 nucleotides. The fragment is preferably less than about 500 nucleotides, preferably less than about 200 nucleotides, more preferably less than about 100 nucleotides, more preferably less than about 50 nucleotides and most preferably less than 30 nucleotides. Preferably the probe is from about 6 nucleotides to about 200 nucleotides, preferably from about 15 to about 50 nucleotides, more preferably from about 17 to 30 nucleotides and most preferably from about 20 to 25 nucleotides. Preferably the fragments can be used in polymerase chain reaction (PCR), various hybridization procedures or microarray procedures to identify or amplify identical or related parts of mRNA or DNA molecules. A fragment or segment may uniquely identify each polynucleotide sequence of the present invention. Preferably the fragment comprises a sequence substantially similar to any one of SEQ ID NOs: 1-20.

[0038] Probes may, for example, be used to determine whether specific mRNA molecules are present in a cell or tissue or to isolate similar nucleic acid sequences from chromosomal DNA as described by Walsh et al. (Walsh, P. S. et al., 1992, PCR Methods Appl. 1:241-250). They may be labeled by nick translation, Klenow fill-in reaction, PCR, or other methods well known in the art. Probes of the present invention, their preparation and/or labeling are elaborated in Sambrook, J. et al., 1989, Molecular Cloning: A Laboratory Manual, Cold Spring Harbor Laboratory, N.Y.; or Ausubel, F. M. et al., 1989, Current Protocols in Molecular Biology, John Wiley & Sons, New York N.Y., both of which are incorporated herein by reference in their entirety.

[0039] The nucleic acid sequences of the present invention also include the sequence information from the nucleic acid sequences of SEQ ID NO:1-236 and 473-708. The sequence information can be a segment of any one of SEQ ID NO:1-236 and 473-708 that uniquely identifies or represents the sequence information of that sequence of SEQ ID NO:1-236 and 473-708. One such segment can be a twenty-mer nucleic acid sequence because the probability that a twenty-mer is fully matched in the human genome is 1 in 300. In the human genome, there are three billion base pairs in one set of chromosomes. Because 420 possible twenty-mers exist, there are 300 times more twenty-mers than there are base pairs in a set of human chromosomes. Using the same analysis, the probability for a seventeen-mer to be fully matched in the human genome is approximately 1 in 5. When these segments are used in arrays for expression studies, fifteen-mer segments can be used. The probability that the fifteen-mer is fully matched in the expressed sequences is also approximately one in five because expressed sequences comprise less than approximately 5% of the entire genome sequence.

[0040] Similarly, when using sequence information for detecting a single mismatch, a segment can be a twenty-five mer. The probability that the twenty-five mer would appear in a human genome with a single mismatch is calculated by multiplying the probability for a full match (1÷4²⁵) times the increased probability for mismatch at each nucleotide position (3×25). The probability that an eighteen mer with a single mismatch can be detected in an array for expression studies is approximately one in five. The probability that a twenty-mer with a single mismatch can be detected in a human genome is approximately one in five.

[0041] The term “open reading frame,” ORF, means a series of nucleotide triplets coding for amino acids without any termination codons and is a sequence translatable into protein.

[0042] The terms “operably linked” or “operably associated” refer to functionally related nucleic acid sequences. For example, a promoter is operably associated or operably linked with a coding sequence if the promoter controls the transcription of the coding sequence. While operably linked nucleic acid sequences can be contiguous and in the same reading frame, certain genetic elements e.g. repressor genes are not contiguously linked to the coding sequence but still control transcription/translation of the coding sequence.

[0043] The term “pluripotent” refers to the capability of a cell to differentiate into a number of differentiated cell types that are present in an adult organism. A pluripotent cell is restricted in its differentiation capability in comparison to a totipotent cell.

[0044] The terms “polypeptide” or “peptide” or “amino acid sequence” refer to an oligopeptide, peptide, polypeptide or protein sequence or fragment thereof and to naturally occurring or synthetic molecules. A polypeptide “fragment,” “portion,” or “segment” is a stretch of amino acid residues of at least about 5 amino acids, preferably at least about 7 amino acids, more preferably at least about 9 amino acids and most preferably at least about 17 or more amino acids. The peptide preferably is not greater than about 500 amino acids, more preferably less than 200 amino acids more preferably less than 150 amino acids and most preferably less than 100 amino acids. Preferably the peptide is from about 5 to about 200 amino acids. To be active, any polypeptide must have sufficient length to display biological and/or immunological activity.

[0045] The term “naturally occurring polypeptide” refers to polypeptides produced by cells that have not been genetically engineered and specifically contemplates various polypeptides arising from post-translational modifications of the polypeptide including, but not limited to, acetylation, carboxylation, glycosylation, phosphorylation, lipidation and acylation.

[0046] The term “translated protein coding portion” means a sequence which encodes for the full

[0047] The term “derivative” refers to polypeptides chemically modified by such techniques as ubiquitination, labeling (e.g., with radionuclides or various enzymes), covalent polymer attachment such as pegylation (derivatization with polyethylene glycol) and insertion or substitution by chemical synthesis of amino acids such as ornithine, which do not normally occur in human proteins.

[0048] The term “variant” (or “analog”) refers to any polypeptide differing from naturally occurring polypeptides by amino acid insertions, deletions, and substitutions, created using, e g., recombinant DNA techniques. Guidance in determining which amino acid residues may be replaced, added or deleted without abolishing activities of interest, may be found by comparing the sequence of the particular polypeptide with that of homologous peptides and minimizing the number of amino acid sequence changes made in regions of high homology (conserved regions) or by replacing amino acids with consensus sequence.

[0049] Alternatively, recombinant variants encoding these same or similar polypeptides may be synthesized or selected by making use of the “redundancy” in the genetic code. Various codon substitutions, such as the silent changes which produce various restriction sites, may be introduced to optimize cloning into a plasmid or viral vector or expression in a particular prokaryotic or eukaryotic system. Mutations in the polynucleotide sequence may be reflected in the polypeptide or domains of other peptides added to the polypeptide to modify the properties of any part of the polypeptide, to change characteristics such as ligand-binding affinities, interchain affinities, or degradation/turnover rate.

[0050] Preferably, amino acid “substitutions” are the result of replacing one amino acid with another amino acid having similar structural and/or chemical properties, i.e., conservative amino acid replacements. “Conservative” amino acid substitutions may be made on the basis of similarity in polarity, charge, solubility, hydrophobicity, hydrophilicity, and/or the amphipathic nature of the residues involved. For example, nonpolar (hydrophobic) amino acids include alanine, leucine, isoleucine, valine, proline, phenylalanine, tryptophan, and methionine; polar neutral amino acids include glycine, serine, threonine, cysteine, tyrosine, asparagine, and glutarmine; positively charged (basic) amino acids include arginine, lysine, and histidine; and negatively charged (acidic) amino acids include aspartic acid and glutamic acid. “Insertions” or “deletions” are preferably in the range of about 1 to 20 amino acids, more preferably 1 to 10 amino acids. The variation allowed may be experimentally determined by systematically making insertions, deletions, or substitutions of amino acids in a polypeptide molecule using recombinant DNA techniques and assaying the resulting recombinant variants for activity.

[0051] Alternatively, where alteration of function is desired, insertions, deletions or non-conservative alterations can be engineered to produce altered polypeptides. Such alterations can, for example, alter one or more of the biological functions or biochemical characteristics of the polypeptides of the invention. For example, such alterations may change polypeptide characteristics such as ligand-binding affinities, interchain affinities, or degradation/turnover rate. Further, such alterations can be selected so as to generate polypeptides that are better suited for expression, scale up and the like in the host cells chosen for expression. For example, cysteine residues can be deleted or substituted with another amino acid residue in order to eliminate disulfide bridges.

[0052] The terms “purified” or “substantially purified” as used herein denotes that the indicated nucleic acid or polypeptide is present in the substantial absence of other biological macromolecules, e.g., polynucleotides, proteins, and the like. In one embodiment, the polynucleotide or polypeptide is purified such that it constitutes at least 95% by weight, more preferably at least 99% by weight, of the indicated biological macromolecules present (but water, buffers, and other small molecules, especially molecules having a molecular weight of less than 1000 daltons, can be present).

[0053] The term “isolated” as used herein refers to a nucleic acid or polypeptide separated from at least one other component (e.g., nucleic acid or polypeptide) present with the nucleic acid or polypeptide in its natural source. In one embodiment, the nucleic acid or polypeptide is found in the presence of (if anything) only a solvent, buffer, ion, or other component normally present in a solution of the same. The terms “isolated” and “purified” do not encompass nucleic acids or polypeptides present in their natural source.

[0054] The term “recombinant,” when used herein to refer to a polypeptide or protein, means that a polypeptide or protein is derived from recombinant (e.g., microbial, insect, or mammalian) expression systems. “Microbial” refers to recombinant polypeptides or proteins made in bacterial or fungal (e.g., yeast) expression systems. As a product, “recombinant microbial” defines a polypeptide or protein essentially free of native endogenous substances and unaccompanied by associated native glycosylation. Polypeptides or proteins expressed in most bacterial cultures, e.g., E. coli, will be free of glycosylation modifications; polypeptides or proteins expressed in yeast will have a glycosylation pattern in general different from those expressed in mammalian cells.

[0055] The term “recombinant expression vehicle or vector” refers to a plasmid or phage or virus or vector, for expressing a polypeptide from a DNA (RNA) sequence. An expression vehicle can comprise a transcriptional unit comprising an assembly of (1) a genetic element or elements having a regulatory role in gene expression, for example, promoters or enhancers, (2) a structural or coding sequence which is transcribed into mRNA and translated into protein, and (3) appropriate transcription initiation and termination sequences. Structural units intended for use in yeast or eukaryotic expression systems preferably include a leader sequence enabling extracellular secretion of translated protein by a host cell. Alternatively, where recombinant protein is expressed without a leader or transport sequence, it may include an amino terminal methionine residue. This residue may or may not be subsequently cleaved from the expressed recombinant protein to provide a final product.

[0056] The term “recombinant expression system” means host cells which have stably integrated a recombinant transcriptional unit into chromosomal DNA or carry the recombinant transcriptional unit extrachromosomally. Recombinant expression systems as defined herein will express heterologous polypeptides or proteins upon induction of the regulatory elements linked to the DNA segment or synthetic gene to be expressed. This term also means host cells which have stably integrated a recombinant genetic element or elements having a regulatory role in gene expression, for example, promoters or enhancers. Recombinant expression systems as defined herein will express polypeptides or proteins endogenous to the cell upon induction of the regulatory elements linked to the endogenous DNA segment or gene to be expressed. The cells can be prokaryotic or eukaryotic.

[0057] The term “secreted” includes a protein that is transported across or through a membrane, including transport as a result of signal sequences in its amino acid sequence when it is expressed in a suitable host cell. “Secreted” proteins include without limitation proteins secreted wholly (e.g., soluble proteins) or partially (e.g., receptors) from the cell in which they are expressed. “Secreted” proteins also include without limitation proteins that are transported across the membrane of the endoplasmic reticulum. “Secreted” proteins are also intended to include proteins containing non-typical signal sequences (e.g. Interleukin-1 Beta, see Krasney, P. A. and Young, P. R (1992) Cytokine 4(2):134 -143) and factors released from damaged cells (e.g. Interleukin-l Receptor Antagonist, see Arend, W. P. et. al. (1998) Annu. Rev. Immunol. 16:27-55)

[0058] Where desired, an expression vector may be designed to contain a “signal or leader sequence” which will direct the polypeptide through the membrane of a cell. Such a sequence may be naturally present on the polypeptides of the present invention or provided from heterologous protein sources by recombinant DNA techniques.

[0059] The term “stringent” is used to refer to conditions that are commonly understood in the art as stringent. Stringent conditions can include highly stringent conditions (i.e., hybridization to filter-bound DNA in 0.5 M NaHPO₄, 7% sodium dodecyl sulfate (SDS), 1 mM EDTA at 65° C., and washing in 0.1×SSC/0.1% SDS at 68° C.), and moderately stringent conditions (i.e., washing in 0.2×SSC/0.1% SDS at 42° C.). Other exemplary hybridization conditions are described herein in the examples.

[0060] In instances of hybridization of deoxyoligonucleotides, additional exemplary stringent hybridization conditions include washing in 6×SSC/0.05% sodium pyrophosphate at 37° C. (for 14-base oligonucleotides), 48° C. (for 17-base oligos), 55° C. (for 20-base oligonucleotides), and 60° C. (for 23-base oligonucleotides).

[0061] As used herein, “substantially equivalent” can refer both to nucleotide and amino acid sequences, for example a mutant sequence, that varies from a reference sequence by one or more substitutions, deletions, or additions, the net effect of which does not result in an adverse functional dissimilarity between the reference and subject sequences. Typically, such a substantially equivalent sequence varies from one of those listed herein by no more than about 35% (i.e., the number of individual residue substitutions, additions, and/or deletions in a substantially equivalent sequence, as compared to the corresponding reference sequence, divided by the total number of residues in the substantially equivalent sequence is about 0.35 or less). Such a sequence is said to have 65% sequence identity to the listed sequence. In one embodiment, a substantially equivalent, e.g., mutant, sequence of the invention varies from a listed sequence by no more than 30% (70% sequence identity); in a variation of this embodiment, by no more than 25% (75% sequence identity); and in a further variation of this embodiment, by no more than 20% (80% sequence identity) and in a further variation of this embodiment, by no more than 10% (90% sequence identity) and in a further variation of this embodiment, by no more that 5% (95% sequence identity). Substantially equivalent, e.g., mutant, amino acid sequences according to the invention preferably have at least 80% sequence identity with a listed amino acid sequence, more preferably at least 90% sequence identity. Substantially equivalent nucleotide sequences of the invention can have lower percent sequence identities, taking into account, for example, the redundancy or degeneracy of the genetic code. Preferably, nucleotide sequence has at least about 65% identity, more preferably at least about 75% identity, and most preferably at least about 95% identity. For the purposes of the present invention, sequences having substantially equivalent biological activity and substantially equivalent expression characteristics are considered substantially equivalent. For the purposes of determining equivalence, truncation of the mature sequence (e.g., via a mutation which creates a spurious stop codon) should be disregarded. Sequence identity may be determined, e.g., using the Jotun Hein method (Hein, J. (1990) Methods Enzymol. 183:626-645). Identity between sequences can also be determined by other methods known in the art, e.g. by varying hybridization conditions.

[0062] The term “totipotent” refers to the capability of a cell to differentiate into all of the cell types of an adult organism.

[0063] The term “transformation” means introducing DNA into a suitable host cell so that the DNA is replicable, either as an extrachromosomal element, or by chromosomal integration. The term “transfection” refers to the taking up of an expression vector by a suitable host cell, whether or not any coding sequences are in fact expressed. The term “infection” refers to the introduction of nucleic acids into a suitable host cell by use of a virus or viral vector.

[0064] As used herein, an “uptake modulating fragment,” UMF, means a series of nucleotides which mediate the uptake of a linked DNA fragment into a cell. UMFs can be readily identified using known UMFs as a target sequence or target motif with the computer-based systems described below. The presence and activity of a UMF can be confirmed by attaching the suspected UMF to a marker sequence. The resulting nucleic acid molecule is then incubated with an appropriate host under appropriate conditions and the uptake of the marker sequence is determined. As described above, a UMF will increase the frequency of uptake of a linked marker sequence.

[0065] Each of the above terms is meant to encompass all that is described for each, unless the context dictates otherwise.

[0066] 4.2 Nucleic Acids of the Invention

[0067] Nucleotide sequences of the invention are set forth in the Sequence Listing.

[0068] The isolated polynucleotides of the invention include a polynucleotide comprising the nucleotide sequences of SEQ ID NO:1-236 and 473-708 ; a polynucleotide encoding any one of the peptide sequences of SEQ ID NO:237-472 and 709-944; and a polynucleotide comprising the nucleotide sequence encoding the mature protein coding sequence of the polypeptides of any one of SEQ ID NO:237-472 and 709-944. The polynucleotides of the present invention also include, but are not limited to, a polynucleotide that hybridizes under stringent conditions to (a) the complement of any of the nucleotides sequences of SEQ ID NO:1-236 and 473-708 ; (b) nucleotide sequences encoding any one of the amino acid sequences set forth in the Sequence Listing as SEQ ID NO:237-472 and 709-944; (c) a polynucleotide which is an allelic variant of any polynucleotide recited above; (d) a polynucleotide which encodes a species homolog of any of the proteins recited above; or (e) a polynucleotide that encodes a polypeptide comprising a specific domain or truncation of the polypeptides of SEQ ID NO:237-472 and 709-944. Domains of interest may depend on the nature of the encoded polypeptide; e.g., domains in receptor-like polypeptides include ligand-binding, extracellular, transmembrane, or cytoplasmic domains, or combinations thereof; domains in immunoglobulin-like proteins include the variable immunoglobulin-like domains; domains in enzyme-like polypeptides include catalytic and substrate binding domains; and domains in ligand polypeptides include receptor-binding domains.

[0069] The polynucleotides of the invention include naturally occurring or wholly or partially synthetic DNA, e.g., cDNA and genomic DNA, and RNA, e.g., mRNA. The polynucleotides may include all of the coding region of the cDNA or may represent a portion of the coding region of the cDNA.

[0070] The present invention also provides genes corresponding to the cDNA sequences disclosed herein. The corresponding genes can be isolated in accordance with known methods using the sequence information disclosed herein. Such methods include the preparation of probes or primers from the disclosed sequence information for identification and/or amplification of genes in appropriate genomic libraries or other sources of genomic materials. Further 5′ and 3′ sequence can be obtained using methods known in the art. For example, full length cDNA or genomic DNA that corresponds to any of the polynucleotides of SEQ ID NO:1-236 and 473-708 can be obtained by screening appropriate cDNA or genomic DNA libraries under suitable hybridization conditions using any of the polynucleotides of SEQ ID NO:1-236 and473-708 or a portion thereof as a probe. Alternatively, the polynucleotides of SEQ ID NO:1-236 and 473-708 may be used as the basis for suitable primer(s) that allow identification and/or amplification of genes in appropriate genomic DNA or cDNA libraries.

[0071] The nucleic acid sequences of the invention can be assembled from ESTs and sequences (including cDNA and genomic sequences) obtained from one or more public databases, such as dbEST, gbpri, and UniGene. The EST sequences can provide identifying sequence information, representative fragment or segment information, or novel segment information for the full-length gene.

[0072] The polynucleotides of the invention also provide polynucleotides including nucleotide sequences that are substantially equivalent to the polynucleotides recited above. Polynucleotides according to the invention can have, e.g., at least about 65%, at least about 70%, at least about 75%, at least about 80%, more typically at least about 90%, and even more typically at least about 95%, sequence identity to a polynucleotide recited above.

[0073] Included within the scope of the nucleic acid sequences of the invention are nucleic acid sequence fragments that hybridize under stringent conditions to any of the nucleotide sequences of SEQ ID NO:1-236 and 473-708, or complements thereof, which fragment is greater than about 5 nucleotides, preferably 7 nucleotides, more preferably greater than 9 nucleotides and most preferably greater than 17 nucleotides. Fragments of, e.g. 15, 17, or 20 nucleotides or more that are selective for (i.e. specifically hybridize to any one of the polynucleotides of the invention) are contemplated. Probes capable of specifically hybridizing to a polynucleotide can differentiate polynucleotide sequences of the invention from other polynucleotide sequences in the same family of genes or can differentiate human genes from genes of other species, and are preferably based on unique nucleotide sequences.

[0074] The sequences falling within the scope of the present invention are not limited to these specific sequences, but also include allelic and species variations thereof. Allelic and species variations can be routinely determined by comparing the sequence provided SEQ ID NO:1 -236 and 473-708, a representative fragment thereof, or a nucleotide sequence at least 90% identical, preferably 95% identical, to SEQ ID NO:1-236 and 473-708 with a sequence from another isolate of the same species. Furthermore, to accommodate codon variability, the invention includes nucleic acid molecules coding for the same amino acid sequences as do the specific ORFs disclosed herein In other words, in the coding region of an ORF, substitution of one codon for another codon that encodes the same amino acid is expressly contemplated.

[0075] The nearest neighbor or homology result for the nucleic acids of the present invention, including SEQ ID NO:1-236 and 473-708, can be obtained by searching a database using an algorithm or a program. Preferably, a BLAST which stands for Basic Local Alignment Search Tool is used to search for local sequence alignments (Altshul, S. F. J Mol. Evol. 36 290-300 (1993) and Altschul S. F. et al. J. Mol. Biol. 21:403-410 (1990)). Alternatively a FASTA version 3 search against Genpept, using Fastxy algorithm.

[0076] Species homologs (or orthologs) of the disclosed polynucleotides and proteins are also provided by the present invention. Species homologs may be isolated and identified by making suitable probes or primers from the sequences provided herein and screening a suitable nucleic acid source from the desired species.

[0077] The invention also encompasses allelic variants of the disclosed polynucleotides or proteins; that is, naturally-occurring alternative forms of the isolated polynucleotide which also encode proteins which are identical, homologous or related to that encoded by the polynucleotides.

[0078] The nucleic acid sequences of the invention are further directed to sequences which encode variants of the described nucleic acids. These amino acid sequence variants may be prepared by methods known in the art by introducing appropriate nucleotide changes into a native or variant polynucleotide. There are two variables in the construction of amino acid sequence variants: the location of the mutation and the nature of the mutation. Nucleic acids encoding the amino acid sequence variants are preferably constructed by mutating the polynucleotide to encode an amino acid sequence that does not occur in nature. These nucleic acid alterations can be made at sites that differ in the nucleic acids from different species (variable positions) or in highly conserved regions (constant regions). Sites at such locations will typically be modified in series, e.g., by substituting first with conservative choices (e.g., hydrophobic amino acid to a different hydrophobic amino acid) and then with more distant choices (e.g., hydrophobic amino acid to a charged amino acid), and then deletions or insertions may be made at the target site. Amino acid sequence deletions generally range from about 1 to 30 residues, preferably about 1 to 10 residues, and are typically contiguous. Amino acid insertions include amino- and/or carboxyl-terminal fusions ranging in length from one to one hundred or more residues, as well as intrasequence insertions of single or multiple amino acid residues. Intrasequence insertions may range generally from about 1 to 10 amino residues, preferably from 1 to 5 residues. Examples of terminal insertions include the heterologous signal sequences necessary for secretion or for intracellular targeting in different host cells and sequences such as FLAG or poly-histidine sequences useful for purifying the expressed protein.

[0079] In a preferred method, polynucleotides encoding the novel amino acid sequences are changed via site-directed mutagenesis. This method uses oligonucleotide sequences to alter a polynucleotide to encode the desired amino acid variant, as well as sufficient adjacent nucleotides on both sides of the changed amino acid to form a stable duplex on either side of the site of being changed. In general, the techniques of site-directed mutagenesis are well known to those of skill in the art and this technique is exemplified by publications such as, Edelman et al., DNA 2:183 (1983). A versatile and efficient method for producing site-specific changes in a polynucleotide sequence was published by Zoller and Smith, Nucleic Acids Res. 10:6487-6500 (1982). PCR may also be used to create amino acid sequence variants of the novel nucleic acids. When small amounts of template DNA are used as starting material, primer(s) that differs slightly in sequence from the corresponding region in the template DNA can generate the desired amino acid variant. PCR amplification results in a population of product DNA fragments that differ from the polynucleotide template encoding the polypeptide at the position specified by the primer. The product DNA fragments replace the corresponding region in the plasmid and this gives a polynucleotide encoding the desired amino acid variant.

[0080] A further technique for generating amino acid variants is the cassette mutagenesis technique described in Wells et al., Gene 34:315 (1985); and other mutagenesis techniques well known in the art, such as, for example, the techniques in Sambrook et al., supra, and Current Protocols in Molecular Biology, Ausubel et al. Due to the inherent degeneracy of the genetic code, other DNA sequences which encode substantially the same or a functionally equivalent amino acid sequence may be used in the practice of the invention for the cloning and expression of these novel nucleic acids. Such DNA sequences include those which are capable of hybridizing to the appropriate novel nucleic acid sequence under stringent conditions.

[0081] Polynucleotides encoding preferred polypeptide truncations of the invention can be used to generate polynucleotides encoding chimeric or fusion proteins comprising one or more domains of the invention and heterologous protein sequences.

[0082] The polynucleotides of the invention additionally include the complement of any of the polynucleotides recited above. The polynucleotide can be DNA (genomic, cDNA, amplified, or synthetic) or RNA. Methods and algorithms for obtaining such polynucleotides are well known to those of skill in the art and can include, for example, methods for determining hybridization conditions that can routinely isolate polynucleotides of the desired sequence identities.

[0083] In accordance with the invention, polynucleotide sequences comprising the mature protein coding sequences corresponding to any one of SEQ ID NO:1-236 and 473-708, or functional equivalents thereof, may be used to generate recombinant DNA molecules that direct the expression of that nucleic acid, or a functional equivalent thereof, in appropriate host cells. Also included are the cDNA inserts of any of the clones identified herein.

[0084] A polynucleotide according to the invention can be joined to any of a variety of other nucleotide sequences by well-established recombinant DNA techniques (see Sambrook J et al. (1989) Molecular Cloning: A Laboratory Manual, Cold Spring Harbor Laboratory, N.Y.). Useful nucleotide sequences for joining to polynucleotides include an assortment of vectors, e.g., plasmids, cosmids, lambda phage derivatives, phagemids, and the like, that are well known in the art. Accordingly, the invention also provides a vector including a polynucleotide of the invention and a host cell containing the polynucleotide. In general, the vector contains an origin of replication functional in at least one organism, convenient restriction endonuclease sites, and a selectable marker for the host cell. Vectors according to the invention include expression vectors, replication vectors, probe generation vectors, and sequencing vectors. A host cell according to the invention can be a prokaryotic or eukaryotic cell and can be a unicellular organism or part of a multicellular organism.

[0085] The present invention further provides recombinant constructs comprising a nucleic acid having any of the nucleotide sequences of SEQ ID NO:1-236 and 473-708 or a fragment thereof or any other polynucleotides of the invention. In one embodiment, the recombinant constructs of the present invention comprise a vector, such as a plasmid or viral vector, into which a nucleic acid having any of the nucleotide sequences of SEQ ID NO:1-236 and 473-708 or a fragment thereof is inserted, in a forward or reverse orientation. In the case of a vector comprising one of the ORFs of the present invention, the vector may further comprise regulatory sequences, including for example, a promoter, operably linked to the ORF. Large numbers of suitable vectors and promoters are known to those of skill in the art and are commercially available for generating the recombinant constructs of the present invention. The following vectors are provided by way of example. Bacterial: pBs, phagescript, PsiX 174, pBluescript SK, pBs KS, pNH8a, pNH16a, pNH18a, pNH46a (Stratagene); pTrc99A, pKK223-3, pKK233-3, pDR540, pRIT5 (Pharmacia). Eukaryotic: pWLneo, pSV2cat, pOG44, PXTI, pSG (Stratagene) pSVK3, pBPV, pMSG, pSVL (Pharmacia).

[0086] The isolated polynucleotide of the invention may be operably linked to an expression control sequence such as the pMT2 or pED expression vectors disclosed in Kaufman et al., Nucleic Acids Res. 19, 4485-4490 (1991), in order to produce the protein recombinantly. Many suitable expression control sequences are known in the art. General methods of expressing recombinant proteins are also known and are exemplified in R. Kaufman, Methods in Enzymology 185, 537-566 (1990). As defined herein “operably linked” means that the isolated polynucleotide of the invention and an expression control sequence are situated within a vector or cell in such a way that the protein is expressed by a host cell which has been transformed (transfected) with the ligated polynucleotide/expression control sequence.

[0087] Promoter regions can be selected from any desired gene using CAT (chloramphenicol transferase) vectors or other vectors with selectable markers. Two appropriate vectors are pKK232-8 and pCM7. Particular named bacterial promoters include lacl, lacZ, T3, T7, gpt, lambda PR, and trc. Eukaryotic promoters include CMV immediate early, HSV thymidine kinase, early and late SV40, LTRs from retrovirus, and mouse metallothionein-1. Selection of the appropriate vector and promoter is well within the level of ordinary skill in the art. Generally, recombinant expression vectors will include origins of replication and selectable markers permitting transformation of the host cell, e.g., the ampicillin resistance gene of E. coli and S. cerevisiae TRP1 gene, and a promoter derived from a highly-expressed gene to direct transcription of a downstream structural sequence. Such promoters can be derived from operons encoding glycolytic enzymes such as 3-phosphoglycerate kinase (PGK), a-factor, acid phosphatase, or heat shock proteins, among others. The heterologous structural sequence is assembled in appropriate phase with translation initiation and termination sequences, and preferably, a leader sequence capable of directing secretion of translated protein into the periplasmic space or extracellular medium. Optionally, the heterologous sequence can encode a fusion protein including an amino terminal identification peptide imparting desired characteristics, e.g., stabilization or simplified purification of expressed recombinant product. Useful expression vectors for bacterial use are constructed by inserting a structural DNA sequence encoding a desired protein together with suitable translation initiation and termination signals in operable reading phase with a functional promoter. The vector will comprise one or more phenotypic selectable markers and an origin of replication to ensure maintenance of the vector and to, if desirable, provide amplification within the host. Suitable prokaryotic hosts for transformation include E. coli, Bacillus subtilis, Salmonella typhimurium and various species within the genera Pseudomonas, Streptomyces, and Staphylococcus, although others may also be employed as a matter of choice.

[0088] As a representative but non-limiting example, useful expression vectors for bacterial use can comprise a selectable marker and bacterial origin of replication derived from commercially available plasmids comprising genetic elements of the well known cloning vector pBR322 (ATCC 37017). Such commercial vectors include, for example, pKK223-3 (Pharmacia Fine Chemicals, Uppsala, Sweden) and GEM 1 (Promega Biotech, Madison, Wis., USA). These pBR322 “backbone” sections are combined with an appropriate promoter and the structural sequence to be expressed. Following transformation of a suitable host strain and growth of the host strain to an appropriate cell density, the selected promoter is induced or derepressed by appropriate means (e.g., temperature shift or chemical induction) and cells are cultured for an additional period. Cells are typically harvested by centrifugation, disrupted by physical or chemical means, and the resulting crude extract retained for further purification.

[0089] Polynucleotides of the invention can also be used to induce immune responses. For example, as described in Fan et al., Nat. Biotech. 17:870-872 (1999), incorporated herein by reference, nucleic acid sequences encoding a polypeptide may be used to generate antibodies against the encoded polypeptide following topical administration of naked plasmid DNA or following injection, and preferably intramuscular injection of the DNA. The nucleic acid sequences are preferably inserted in a recombinant expression vector and may be in the form of naked DNA.

[0090] 4.3 Antisense

[0091] Another aspect of the invention pertains to isolated antisense nucleic acid molecules that are hybridizable to or complementary to the nucleic acid molecule comprising the nucleotide sequence of SEQ ID NO:1-236 and 473-708, or fragments, analogs or derivatives thereof. An “antisense” nucleic acid comprises a nucleotide sequence that is complementary to a “sense” nucleic acid encoding a protein, e.g., complementary to the coding strand of a double-stranded cDNA molecule or complementary to an mRNA sequence. In specific aspects, antisense nucleic acid molecules are provided that comprise a sequence complementary to at least about 10, 25, 50, 100, 250 or 500 nucleotides or an entire coding strand, or to only a portion thereof. Nucleic acid molecules encoding fragments, homologs, derivatives and analogs of a protein of any of SEQ ID NO:237-472 and 709-944 or antisense nucleic acids complementary to a nucleic acid sequence of SEQ ID NO:1-236 and 473-708 are additionally provided.

[0092] In one embodiment, an antisense nucleic acid molecule is antisense to a “coding region” of the coding strand of a nucleotide sequence of the invention. The term “coding region” refers to the region of the nucleotide sequence comprising codons which are translated into amino acid residues. In another embodiment, the antisense nucleic acid molecule is antisense to a “noncoding region” of the coding strand of a nucleotide sequence of the invention. The term “noncoding region” refers to 5′ and 3′ sequences which flank the coding region that are not translated into amino acids (i.e., also referred to as 5′ and 3′ untranslated regions).

[0093] Given the coding strand sequences encoding a nucleic acid disclosed herein (e.g., SEQ ID NO:1-236 and 473-708), antisense nucleic acids of the invention can be designed according to the rules of Watson and Crick or Hoogsteen base pairing. The antisense nucleic acid molecule can be complementary to the entire coding region of a mRNA, but more preferably is an oligonucleotide that is antisense to only a portion of the coding or noncoding region of a mRNA. For example, the antisense oligonucleotide can be complementary to the region surrounding the translation start site of a mRNA. An antisense oligonucleotide can be, for example, about 5, 10, 15, 20, 25, 30, 35, 40, 45 or 50 nucleotides in length. An antisense nucleic acid of the invention can be constructed using chemical synthesis or enzymatic ligation reactions using procedures known in the art. For example, an antisense nucleic acid (e.g., an antisense oligonucleotide) can be chemically synthesized using naturally occurring nucleotides or variously modified nucleotides designed to increase the biological stability of the molecules or to increase the physical stability of the duplex formed between the antisense and sense nucleic acids, e.g., phosphorothioate derivatives and acridine substituted nucleotides can be used.

[0094] Examples of modified nucleotides that can be used to generate the antisense nucleic acid include: 5-fluorouracil, 5-bromouracil, 5-chlorouracil, 5-iodouracil, hypoxanthine, xanthine, 4-acetylcytosine, 5-(carboxyhydroxylmethyl) uracil, 5-carboxymethylaminomethyl-2-thiouridine, 5-carboxymethylaminomethyluracil, dihydrouracil, beta-D-galactosylqueosine, inosine, N6-isopentenyladenine, 1-methylguanine, 1-methylinosine, 2,2-dimethylguanine, 2-methyladenine, 2-methylguanine, 3-methylcytosine, 5-methylcytosine, N6-adenine, 7-methylguanine, 5-methylaminomethyluracil, 5-methoxyaminomethyl-2-thiouracil, beta-D-mannosylqueosine, 5′-methoxycarboxymethyluracil, 5-methoxyuracil, 2-methylthio-N6-isopentenyladenine, uracil-5-oxyacefic acid (v), wybutoxosine, pseudouracil, queosine, 2-thiocytosine, 5-methyl-2-thiouracil, 2-thiouracil, 4-thiouracil, 5-methyluracil, uracil-5-oxyacetic acid methylester, uracil-5-oxyacetic acid (v), 5-methyl-2-thiouracil, 3-(3-amino-3-N-2-carboxypropyl) uracil, (acp3)w, and 2,6-diaminopurine. Alternatively, the antisense nucleic acid can be produced biologically using an expression vector into which a nucleic acid has been subcloned in an antisense orientation (ie., RNA transcribed from the inserted nucleic acid will be of an antisense orientation to a target nucleic acid of interest, described further in the following subsection).

[0095] The antisense nucleic acid molecules of the invention are typically administered to a subject or generated in situ such that they hybridize with or bind to cellular mRNA and/or genomic DNA encoding a protein according to the invention to thereby inhibit expression of the protein, e.g., by inhibiting transcription and/or translation. The hybridization can be by conventional nucleotide complementarity to form a stable duplex, or, for example, in the case of an antisense nucleic acid molecule that binds to DNA duplexes, through specific interactions in the major groove of the double helix. An example of a route of administration of antisense nucleic acid molecules of the invention includes direct injection at a tissue site. Alternatively, antisense nucleic acid molecules can be modified to target selected cells and then administered systemically. For example, for systemic administration, antisense molecules can be modified such that they specifically bind to receptors or antigens expressed on a selected cell surface, e.g., by linking the antisense nucleic acid molecules to peptides or antibodies that bind to cell surface receptors or antigens. The antisense nucleic acid molecules can also be delivered to cells using the vectors described herein. To achieve sufficient intracellular concentrations of antisense molecules, vector constructs in which the antisense nucleic acid molecule is placed under the control of a strong pol II or pol III promoter are preferred.

[0096] In yet another embodiment, the antisense nucleic acid molecule of the invention is an α-anomeric nucleic acid molecule. An α-anomeric nucleic acid molecule forms specific double-stranded hybrids with complementary RNA in which, contrary to the usual β-units, the strands run parallel to each other (Gaultier et al. (1987) Nucleic Acids Res 15: 6625-6641). The antisense nucleic acid molecule can also comprise a 2′-o-methylribonucleotide (Inoue et al. (1987) Nucleic Acids Res 15: 6131-6148) or a chimeric RNA-DNA analogue (Inoue et al. (1987) FEBS Lett 215: 327-330).

[0097] 4.4 Ribozymes and PNA Moieties

[0098] In still another embodiment, an antisense nucleic acid of the invention is a ribozyme. Ribozymes are catalytic RNA molecules with ribonuclease activity that are capable of cleaving a single-stranded nucleic acid, such as a mRNA, to which they have a complementary region. Thus, ribozymes (e.g., hammerhead ribozymes (described in Haselhoff and Gerlach (1988) Nature 334:585-591)) can be used to catalytically cleave a mRNA transcripts to thereby inhibit translation of a mRNA. A ribozyme having specificity for a nucleic acid of the invention can be designed based upon the nucleotide sequence of a DNA disclosed herein (i.e., SEQ ID NO:1-236 and 473-708). For example, a derivative of a Tetrahymena L- 19 IVS RNA can be constructed in which the nucleotide sequence of the active site is complementary to the nucleotide sequence to be cleaved in a SECX-encoding mRNA. See, e.g., Cech et al. U.S. Pat. No. 4,987,071; and Cech et al. U.S. Pat. No. 5,116,742. Alternatively, SECX mRNA can be used to select a catalytic RNA having a specific ribonuclease activity from a pool of RNA molecules. See, e.g., Bartel et al., (1993) Science 261:1411-1418.

[0099] Alternatively, gene expression can be inhibited by targeting nucleotide sequences complementary to the regulatory region (e.g., promoter and/or enhancers) to form triple helical structures that prevent transcription of the gene in target cells. See generally, Helene. (1991) Anticancer Drug Des. 6: 569-84; Helene. et al. (1992) Ann. N.Y. Acad Sci. 660:27-36; and Maher (1992) Bioassays 14: 807-15.

[0100] In various embodiments, the nucleic acids of the invention can be modified at the base moiety, sugar moiety or phosphate backbone to improve, e.g., the stability, hybridization, or solubility of the molecule. For example, the deoxyribose phosphate backbone of the nucleic acids can be modified to generate peptide nucleic acids (see Hyrup et al. (1996) Bioorg Med Chem 4: 5-23). As used herein, the terms “peptide nucleic acids” or “PNAs” refer to nucleic acid mimics, e.g., DNA mimics, in which the deoxyribose phosphate backbone is replaced by a pseudopeptide backbone and only the four natural nucleobases are retained. The neutral backbone of PNAs has been shown to allow for specific hybridization to DNA and RNA under conditions of low ionic strength. The synthesis of PNA oligomers can be performed using standard solid phase peptide synthesis protocols as described in Hyrup et al. (1996) above; Perry-O'Keefe et al. (1996) PNAS 93: 14670-675.

[0101] PNAs of the invention can be used in therapeutic and diagnostic applications. For example, PNAs can be used as antisense or antigene agents for sequence-specific modulation of gene expression by, e.g., inducing transcription or translation arrest or inhibiting replication. PNAs of the invention can also be used, e.g., in the analysis of single base pair mutations in a gene by, e.g., PNA directed PCR clamping; as artificial restriction enzymes when used in combination with other enzymes, e.g., S1 nucleases (Hyrup B. (1996) above); or as probes or primers for DNA sequence and hybridization (Hyrup et al. (1996), above; Perry-O'Keefe (1996), above).

[0102] In another embodiment, PNAs of the invention can be modified, e.g., to enhance their stability or cellular uptake, by attaching lipophilic or other helper groups to PNA, by the formation of PNA-DNA chimeras, or by the use of liposomes or other techniques of drug delivery known in the art. For example, PNA-DNA chimeras can be generated that may combine the advantageous properties of PNA and DNA. Such chimeras allow DNA recognition enzymes, e.g., RNase H and DNA polymerases, to interact with the DNA portion while the PNA portion would provide high binding affinity and specificity. PNA-DNA chimeras can be linked using linkers of appropriate lengths selected in terms of base stacking, number of bonds between the nucleobases, and orientation (Hyrup (1996) above). The synthesis of PNA-DNA chimeras can be performed as described in Hyrup (1996) above and Finn et al. (1996) Nucl Acids Res 24: 3357-63. For example, a DNA chain can be synthesized on a solid support using standard phosphoramidite coupling chemistry, and modified nucleoside analogs, e.g., 5′-(4-methoxytrityl)amino-5′-deoxy-thymidine phosphoramidite, can be used between the PNA and the 5′ end of DNA (Mag et al. (1989) Nucl Acid Res 17: 5973-88). PNA monomers are then coupled in a stepvise manner to produce a chimeric molecule with a 5′ PNA segment and a 3′ DNA segment (Finn et al. (1996) above). Alternatively, chimeric molecules can be synthesized with a 5′ DNA segment and a 3′ PNA segment. See, Petersen et al. (1975) Bioorg Med Chem Lett5: 1119-11124.

[0103] In other embodiments, the oligonucleotide may include other appended groups such as peptides (e.g., for targeting host cell receptors in vivo), or agents facilitating transport across the cell membrane (see, e.g., Letsinger et al., 1989, Proc. Natl. Acad Sci. U.S.A. 86:6553-6556; Lemaitre et al., 1987, Proc. Natl. Acad. Sci. 84:648-652; PCT Publication No. WO88/09810) or the blood-brain barrier (see, e.g., PCT Publication No. WO89/10134). In addition, oligonucleotides can be modified with hybridization triggered cleavage agents (See, e.g., Krol et al., 1988, BioTechniques 6:958-976) or intercalating agents. (See, e.g., Zon, 1988, Pharm. Res. 5: 539-549). To this end, the oligonucleotide may be conjugated to another molecule, e.g., a peptide, a hybridization triggered cross-linking agent, a transport agent, a hybridization-triggered cleavage agent, etc.

[0104] 4.5 Hosts

[0105] The present invention further provides host cells genetically engineered to contain the polynucleotides of the invention. For example, such host cells may contain nucleic acids of the invention introduced into the host cell using known transformation, transfection or infection methods. The present invention still further provides host cells genetically engineered to express the polynucleotides of the invention, wherein such polynucleotides are in operative association with a regulatory sequence heterologous to the host cell which drives expression of the polynucleotides in the cell.

[0106] Knowledge of nucleic acid sequences allows for modification of cells to permit, or increase, expression of endogenous polypeptide. Cells can be modified (e.g., by homologous recombination) to provide increased polypeptide expression by replacing, in whole or in part, the naturally occurring promoter with all or part of a heterologous promoter so that the cells express the polypeptide at higher levels. The heterologous promoter is inserted in such a manner that it is operatively linked to the encoding sequences. See, for example, PCT International Publication No. WO94/12650, PCT International Publication No. WO92/20808, and PCT International Publication No. WO91/09955. It is also contemplated that, in addition to heterologous promoter DNA, amplifiable marker DNA (e.g., ada, dhfr, and the multifunctional CAD gene which encodes carbamyl phosphate synthase, aspartate transcarbarnylase, and dihydroorotase) and/or intron DNA may be inserted along with the heterologous promoter DNA. If linked to the coding sequence, amplification of the marker DNA by standard selection methods results in co-amplification of the desired protein coding sequences in the cells.

[0107] The host cell can be a higher eukaryotic host cell, such as a mammalian cell, a lower eukaryotic host cell, such as a yeast cell, or the host cell can be a prokaryotic cell, such as a bacterial cell. Introduction of the recombinant construct into the host cell can be effected by calcium phosphate transfection, DEAE, dextran mediated transfection, or electroporation (Davis, L. et al., Basic Methods in Molecular Biology (1986)). The host cells containing one of the polynucleotides of the invention, can be used in conventional manners to produce the gene product encoded by the isolated fragment (in the case of an ORF) or can be used to produce a heterologous protein under the control of the EMF.

[0108] Any host/vector system can be used to express one or more of the ORFs of the present invention. These include, but are not limited to, eukaryotic hosts such as HeLa cells, Cv-1 cell, COS cells, 293 cells, and Sf9 cells, as well as prokaryotic host such as E. coli and B. subtilis. The most preferred cells are those which do not normally express the particular polypeptide or protein or which expresses the polypeptide or protein at low natural level. Mature proteins can be expressed in mammalian cells, yeast, bacteria, or other cells under the control of appropriate promoters. Cell-free translation systems can also be employed to produce such proteins using RNAs derived from the DNA constructs of the present invention. Appropriate cloning and expression vectors for use with prokaryotic and eukaryotic hosts are described by Sambrook, et al., in Molecular Cloning: A Laboratory Manual, Second Edition, Cold Spring Harbor, N.Y. (1989), the disclosure of which is hereby incorporated by reference.

[0109] Various mammalian cell culture systems can also be employed to express recombinant protein. Examples of mammalian expression systems include the COS-7 lines of monkey kidney fibroblasts, described by Gluzman, Cell 23:175 (1981). Other cell lines capable of expressing a compatible vector are, for example, the C127, monkey COS cells, Chinese Hamster Ovary (CHO) cells, human kidney 293 cells, human epidermal A431 cells, human Colo205 cells, 3T3 cells, CV-1 cells, other transformed primate cell lines, normal diploid cells, cell strains derived from in vitro culture of primary tissue, primary explants, HeLa cells, mouse L cells, BHK, HL-60, U937, HaK or Jurkat cells. Mammalian expression vectors will comprise an origin of replication, a suitable promoter and also any necessary ribosome binding sites, polyadenylation site, splice donor and acceptor sites, transcriptional termination sequences, and 5′ flanking nontranscribed sequences. DNA sequences derived from the SV40 viral genome, for example, SV40 origin, early promoter, enhancer, splice, and polyadenylation sites may be used to provide the required nontranscribed genetic elements. Recombinant polypeptides and proteins produced in bacterial culture are usually isolated by initial extraction from cell pellets, followed by one or more salting-out, aqueous ion exchange or size exclusion chromatography steps. Protein refolding steps can be used, as necessary, in completing configuration of the mature protein. Finally, high performance liquid chromatography (HPLC) can be employed for final purification steps. Microbial cells employed in expression of proteins can be disrupted by any convenient method, including freeze-thaw cycling, sonication, mechanical disruption, or use of cell lysing agents.

[0110] Alternatively, it may be possible to produce the protein in lower eukaryotes such as yeast or insects or in prokaryotes such as bacteria. Potentially suitable yeast strains include Saccharomyces cerevisiae, Schizosaccharomyces pombe, Kluyveromyces strains, Candida, or any yeast strain capable of expressing heterologous proteins. Potentially suitable bacterial strains include Escherichia coli, Bacillus subtilis, Salmonella typhimurium, or any bacterial strain capable of expressing heterologous proteins. If the protein is made in yeast or bacteria, it may be necessary to modify the protein produced therein, for example by phosphorylation or glycosylation of the appropriate sites, in order to obtain the functional protein. Such covalent attachments may be accomplished using known chemical or enzymatic methods.

[0111] In another embodiment of the present invention, cells and tissues may be engineered to express an endogenous gene comprising the polynucleotides of the invention under the control of inducible regulatory elements, in which case the regulatory sequences of the endogenous gene may be replaced by homologous recombination. As described herein, gene targeting can be used to replace a gene's existing regulatory region with a regulatory sequence isolated from a different gene or a novel regulatory sequence synthesized by genetic engineering methods. Such regulatory sequences may be comprised of promoters, enhancers, scaffold-attachment regions, negative regulatory elements, transcriptional initiation sites, regulatory protein binding sites or combinations of said sequences. Alternatively, sequences which affect the structure or stability of the RNA or protein produced may be replaced, removed, added, or otherwise modified by targeting. These sequence include polyadenylation signals, mRNA stability elements, splice sites, leader sequences for enhancing or modifying transport or secretion properties of the protein, or other sequences which alter or improve the function or stability of protein or RNA molecules.

[0112] The targeting event may be a simple insertion of the regulatory sequence, placing the gene under the control of the new regulatory sequence, e.g., inserting a new promoter or enhancer or both upstream of a gene. Alternatively, the targeting event may be a simple deletion of a regulatory element, such as the deletion of a tissue-specific negative regulatory element. Alternatively, the targeting event may replace an existing element; for example, a tissue-specific enhancer can be replaced by an enhancer that has broader or different cell-type specificity than the naturally occurring elements. Here, the naturally occurring sequences are deleted and new sequences are added. In all cases, the identification of the targeting event may be facilitated by the use of one or more selectable marker genes that are contiguous with the targeting DNA, allowing for the selection of cells in which the exogenous DNA has integrated into the host cell genome. The identification of the targeting event may also be facilitated by the use of one or more marker genes exhibiting the property of negative selection, such that the negatively selectable marker is linked to the exogenous DNA, but configured such that the negatively selectable marker flanks the targeting sequence, and such that a correct homologous recombination event with sequences in the host cell genome does not result in the stable integration of the negatively selectable marker. Markers useful for this purpose include the Herpes Simplex Virus thymidine kinase (TK) gene or the bacterial xanthine-guanine phosphoribosyl-transferase (gpt) gene.

[0113] The gene targeting or gene activation techniques which can be used in accordance with this aspect of the invention are more particularly described in U.S. Pat. No. 5,272,071 to Chappel; U.S. Pat. No. 5,578,461 to Sherwin et al.; International Application No. PCTIUS92/09627 (WO93/09222) by Selden et al.; and International Application No. PCT/US90/06436 (WO91/06667) by Skoultchi et al., each of which is incorporated by reference herein in its entirety.

[0114] 4.6 Polypeptides of the Invention

[0115] The isolated polypeptides of the invention include, but are not limited to, a polypeptide comprising: the amino acid sequences set forth as any one of SEQ ID NO:237-472 and 709-944 or an amino acid sequence encoded by any one of the nucleotide sequences SEQ ID NO:1-236 and 473-708 or the corresponding full length or mature protein. Polypeptides of the invention also include polypeptides preferably with biological or immunological activity that are encoded by: (a) a polynucleotide having any one of the nucleotide sequences set forth in SEQ ID NO:1-236 and 473-708 or (b) polynucleotides encoding any one of the amino acid sequences set forth as SEQ ID NO:237-472 and 709-944 or (c) polynucleotides that hybridize to the complement of the polynucleotides of either (a) or (b) under stringent hybridization conditions. The invention also provides biologically active or immunologically active variants of any of the amino acid sequences set forth as SEQ ID NO:237-472 and 709-944 or the corresponding full length or mature protein; and “substantial equivalents” thereof (e.g., with at least about 65%, at least about 70%, at least about 75%, at least about 80%, at least about 85%, at least about 90%, typically at least about 95%, more typically at least about 98%, or most typically at least about 99% amino acid identity) that retain biological activity. Polypeptides encoded by allelic variants may have a similar, increased, or decreased activity compared to polypeptides comprising SEQ ID NO:237-472 and 709-944.

[0116] Fragments of the proteins of the present invention which are capable of exhibiting biological activity are also encompassed by the present invention. Fragments of the protein may be in linear form or they may be cyclized using known methods, for example, as described in H. U. Saragovi, et al., Bio/Technology 10, 773-778 (1992) and in R. S. McDowell, et al., J. Amer. Chem. Soc. 114, 9245-9253 (1992), both of which are incorporated herein by reference. Such fragments may be fused to carrier molecules such as immunoglobulins for many purposes, including increasing the valency of protein binding sites.

[0117] The present invention also provides both full-length and mature forms (for example, without a signal sequence or precursor sequence) of the disclosed proteins. The protein coding sequence is identified in the sequence listing by translation of the disclosed nucleotide sequences. The mature form of such protein may be obtained by expression of a full-length polynucleotide in a suitable mammalian cell or other host cell. The sequence of the mature form of the protein is also determinable from the amino acid sequence of the full-length form. Where proteins of the present invention are membrane bound, soluble forms of the proteins are also provided. In such forms, part or all of the regions causing the proteins to be membrane bound are deleted so that the proteins are fully secreted from the cell in which they are expressed.

[0118] Protein compositions of the present invention may further comprise an acceptable carrier, such as a hydrophilic, e.g., pharmaceutically acceptable, carrier.

[0119] The present invention further provides isolated polypeptides encoded by the nucleic acid fragments of the present invention or by degenerate variants of the nucleic acid fragments of the present invention. By “degenerate variant” is intended nucleotide fragments which differ from a nucleic acid fragment of the present invention (e.g., an ORF) by nucleotide sequence but, due to the degeneracy of the genetic code, encode an identical polypeptide sequence. Preferred nucleic acid fragments of the present invention are the ORFs that encode proteins.

[0120] A variety of methodologies known in the art can be utilized to obtain any one of the isolated polypeptides or proteins of the present invention. At the simplest level, the amino acid sequence can be synthesized using commercially available peptide synthesizers. The synthetically-constructed protein sequences, by virtue of sharing primary, secondary or tertiary structural and/or conformational characteristics with proteins may possess biological properties in common therewith, including protein activity. This technique is particularly useful in producing small peptides and fragments of larger polypeptides. Fragments are useful, for example, in generating antibodies against the native polypeptide. Thus, they may be employed as biologically active or immunological substitutes for natural, purified proteins in screening of therapeutic compounds and in immunological processes for the development of antibodies.

[0121] The polypeptides and proteins of the present invention can alternatively be purified from cells which have been altered to express the desired polypeptide or protein. As used herein, a cell is said to be altered to express a desired polypeptide or protein when the cell, through genetic manipulation, is made to produce a polypeptide or protein which it normally does not produce or which the cell normally produces at a lower level. One skilled in the art can readily adapt procedures for introducing and expressing either recombinant or synthetic sequences into eukaryotic or prokaryotic cells in order to generate a cell which produces one of the polypeptides or proteins of the present invention.

[0122] The invention also relates to methods for producing a polypeptide comprising growing a culture of host cells of the invention in a suitable culture medium, and purifying the protein from the cells or the culture in which the cells are grown. For example, the methods of the invention include a process for producing a polypeptide in which a host cell containing a suitable expression vector that includes a polynucleotide of the invention is cultured under conditions that allow expression of the encoded polypeptide. The polypeptide can be recovered from the culture, conveniently from the culture medium, or from a lysate prepared from the host cells and further purified. Preferred embodiments include those in which the protein produced by such process is a full length or mature form of the protein.

[0123] In an alternative method, the polypeptide or protein is purified from bacterial cells which naturally produce the polypeptide or protein. One skilled in the art can readily follow known methods for isolating polypeptides and proteins in order to obtain one of the isolated polypeptides or proteins of the present invention. These include, but are not limited to, immunochromatography, HPLC, size-exclusion chromatography, ion-exchange chromatography, and immuno-affinity chromatography. See, e.g., Scopes, Protein Purification: Principles and Practice, Springer-Verlag (1994); Sambrook, et al., in Molecular Cloning: A Laboratory Manual; Ausubel et al., Current Protocols in Molecular Biology. Polypeptide fragments that retain biological/immunological activity include fragments comprising greater than about 100 amino acids, or greater than about 200 amino acids, and fragments that encode specific protein domains.

[0124] The purified polypeptides can be used in in vitro binding assays which are well known in the art to identify molecules which bind to the polypeptides. These molecules include but are not limited to, for e.g., small molecules, molecules from combinatorial libraries, antibodies or other proteins. The molecules identified in the binding assay are then tested for antagonist or agonist activity in in vivo tissue culture or animal models that are well known in the art. In brief, the molecules are titrated into a plurality of cell cultures or animals and then tested for either cell/animal death or prolonged survival of the animal/cells.

[0125] In addition, the peptides of the invention or molecules capable of binding to the peptides may be complexed with toxins, e.g., ricin or cholera, or with other compounds that are toxic to cells. The toxin-binding molecule complex is then targeted to a tumor or other cell by the specificity of the binding molecule for SEQ ID NO:237-472 and 709-944.

[0126] The protein of the invention may also be expressed as a product of transgenic animals, e.g., as a component of the milk of transgenic cows, goats, pigs, or sheep which are characterized by somatic or germ cells containing a nucleotide sequence encoding the protein.

[0127] The proteins provided herein also include proteins characterized by amino acid sequences similar to those of purified proteins but into which modification are naturally provided or deliberately engineered. For example, modifications, in the peptide or DNA sequence, can be made by those skilled in the art using known techniques. Modifications of interest in the protein sequences may include the alteration, substitution, replacement, insertion or deletion of a selected amino acid residue in the coding sequence. For example, one or more of the cysteine residues may be deleted or replaced with another amino acid to alter the conformation of the molecule. Techniques for such alteration, substitution, replacement, insertion or deletion are well known to those skilled in the art (see, e.g., U.S. Pat. No. 4,518,584). Preferably, such alteration, substitution, replacement, insertion or deletion retains the desired activity of the protein. Regions of the protein that are important for the protein function can be determined by various methods known in the art including the alanine-scanning method which involved systematic substitution of single or strings of amino acids with alanine, followed by testing the resulting alanine-containing variant for biological activity. This type of analysis determines the importance of the substituted amino acid(s) in biological activity. Regions of the protein that are important for protein function may be determined by the eMATRIX program.

[0128] Other fragments and derivatives of the sequences of proteins which would be expected to retain protein activity in whole or in part and are useful for screening or other immunological methodologies may also be easily made by those skilled in the art given the disclosures herein. Such modifications are encompassed by the present invention.

[0129] The protein may also be produced by operably linking the isolated polynucleotide of the invention to suitable control sequences in one or more insect expression vectors, and employing an insect expression system. Materials and methods for baculovirus/insect cell expression systems are commercially available in kit form from, e.g., Invitrogen, San Diego, Calif., U.S.A. (the MaxBat™ kit), and such methods are well known in the art, as described in Summers and Smith, Texas Agricultural Experiment Station Bulletin No. 1555 (1987), incorporated herein by reference. As used herein, an insect cell capable of expressing a polynucleotide of the present invention is “transformed.”

[0130] The protein of the invention may be prepared by culturing transformed host cells under culture conditions suitable to express the recombinant protein. The resulting expressed protein may then be purified from such culture (i.e., from culture medium or cell extracts) using known purification processes, such as gel filtration and ion exchange chromatography. The purification of the protein may also include an affinity column containing agents which will bind to the protein; one or more column steps over such affinity resins as concanavalin A-agarose, heparin-toyopearl™ or Cibacrom blue 3GA Sepharose™; one or more steps involving hydrophobic interaction chromatography using such resins as phenyl ether, butyl ether, or propyl ether; or immunoaffinity chromatography.

[0131] Alternatively, the protein of the invention may also be expressed in a form which will facilitate purification. For example, it may be expressed as a fusion protein, such as those of maltose binding protein (MBP), glutathione-S-transferase (GST) or thioredoxin (TRX), or as a His tag. Kits for expression and purification of such fusion proteins are commercially available from New England BioLab (Beverly, Mass.), Pharmacia (Piscataway, N.J.) and Invitrogen, respectively. The protein can also be tagged with an epitope and subsequently purified by using a specific antibody directed to such epitope. One such epitope (“FLAG®”) is commercially available from Kodak (New Haven, Conn.).

[0132] Finally, one or more reverse-phase high performance liquid chromatography (RP-HPLC) steps employing hydrophobic RP-HPLC media, e.g., silica gel having pendant methyl or other aliphatic groups, can be employed to further purify the protein. Some or all of the foregoing purification steps, in various combinations, can also be employed to provide a substantially homogeneous isolated recombinant protein. The protein thus purified is substantially free of other mammalian proteins and is defined in accordance with the present invention as an “isolated protein.”

[0133] The polypeptides of the invention include analogs (variants). This embraces fragments, as well as peptides in which one or more amino acids has been deleted, inserted, or substituted. Also, analogs of the polypeptides of the invention embrace fusions of the polypeptides or modifications of the polypeptides of the invention, wherein the polypeptide or analog is fused to another moiety or moieties, e.g., targeting moiety or another therapeutic agent. Such analogs may exhibit improved properties such as activity and/or stability. Examples of moieties which may be fused to the polypeptide or an analog include, for example, targeting moieties which provide for the delivery of polypeptide to pancreatic cells, e.g., antibodies to pancreatic cells, antibodies to immune cells such as T-cells, monocytes, dendritic cells, granulocytes, etc., as well as receptor and ligands expressed on pancreatic or immune cells. Other moieties which may be fused to the polypeptide include therapeutic agents which are used for treatment, for example, immunosuppressive drugs such as cyclosporin, SK506, azathioprine, CD3 antibodies and steroids. Also, polypeptides may be fused to immune modulators, and other cytokines such as alpha or beta interferon.

[0134] 4.6.1 Determining Polypeptide and Polynucleotide Identity and Similarity

[0135] Preferred identity and/or similarity are designed to give the largest match between the sequences tested. Methods to determine identity and similarity are codified in computer programs including, but are not limited to, the GCG program package, including GAP (Devereux, J., et al., Nucleic Acids Research 12(1):387 (1984); Genetics Computer Group, University of Wisconsin, Madison, Wis.), BLASTP, BLASTN, BLASTX, FASTA (Altschul, S. F. et al., J. Molec. Biol. 215:403-410 (1990), PSI-BLAST (Altschul S. F. et al., Nucleic Acids Res. vol.25, pp. 3389-3402, herein incorporated by reference), eMatrix software (Wu et al., J. Comp. Biol., Vol. 6, pp. 219-235 (1999), herein incorporated by reference), eMotif software (Nevill-Manning et al, ISMB-97, Vol. 4, pp. 202-209, herein incorporated by reference), pFam software (Sonnhammer et al., Nucleic Acids Res., Vol. 26(l), pp.320-322 (1998), herein incorporated by reference) and the Kyte-Doolittle hydrophobocity prediction algorithm (J. Mol Biol, 157, pp. 105-31 (1982), incorporated herein by reference). The BLAST programs are publicly available from the National Center for Biotechnology Information (NCBI) and other sources (BLAST Manual, Altschul, S., et al. NCB NLM NIH Bethesda, Md. 20894; Altschul, S., et al., J. Mol. Biol. 215:403410 (1990).

[0136] 4.7 Chimeric and Fusion Proteins

[0137] The invention also provides chimeric or fusion proteins. As used herein, a “chimeric protein” or “fusion protein” comprises a polypeptide of the invention operatively linked to another polypeptide. Within a fusion protein the polypeptide according to the invention can correspond to all or a portion of a protein according to the invention. In one embodiment, a fusion protein comprises at least one biologically active portion of a protein according to the invention. In another embodiment, a fusion protein comprises at least two biologically active portions of a protein according to the invention. Within the fusion protein, the term “operatively linked” is intended to indicate that the polypeptide according to the invention and the other polypeptide are fused in-frame to each other. The polypeptide can be fused to the N-terminus or C-terminus.

[0138] For example, in one embodiment a fusion protein comprises a polypeptide according to the invention operably linked to the extracellular domain of a second protein. In another embodiment, the fusion protein is a GST-fusion protein in which the polypeptide sequences of the invention are fused to the C-terminus of the GST (i.e., glutathione S-transferase) sequences.

[0139] In another embodiment, the fusion protein is an immunoglobulin fusion protein in which the polypeptide sequences according to the invention comprise one or more domains fused to sequences derived from a member of the immunoglobulin protein family. The immunoglobulin fusion proteins of the invention can be incorporated into pharmaceutical compositions and administered to a subject to inhibit an interaction between a ligand and a protein of the invention on the surface of a cell, to thereby suppress signal transduction in vivo. The immunoglobulin fusion proteins can be used to affect the bioavailability of a cognate ligand. Inhibition of the ligand/protein interaction may be useful therapeutically for both the treatment of proliferative and differentiative disorders, e,g., cancer as well as modulating (e.g., promoting or inhibiting) cell survival. Moreover, the immunoglobulin fusion proteins of the invention can be used as immunogens to produce antibodies in a subject, to purify ligands, and in screening assays to identify molecules that inhibit the interaction of a polypeptide of the invention with a ligand.

[0140] A chimeric or fusion protein of the invention can be produced by standard recombinant DNA techniques. For example, DNA fragments coding for the different polypeptide sequences are ligated together in-frame in accordance with conventional techniques, e.g., by employing blunt-ended or stagger-ended termini for ligation, restriction enzyme digestion to provide for appropriate termini, filling-in of cohesive ends as appropriate, alkaline phosphatase treatment to avoid undesirable joining, and enzymatic ligation. In another embodiment, the fusion gene can be synthesized by conventional techniques including automated DNA synthesizers. Alternatively, PCR amplification of gene fragments can be carried out using anchor primers that give rise to complementary overhangs between two consecutive gene fragments that can subsequently be annealed and reamplified to generate a chimeric gene sequence (see, for example, Ausubel et al. (eds.) CURRENT PROTOCOLS IN MOLECULAR BIOLOGY, John Wiley & Sons, 1992). Moreover, many expression vectors are commercially available that already encode a fusion moiety (e.g., a GST polypeptide). A nucleic acid encoding a polypeptide of the invention can be cloned into such an expression vector such that the fusion moiety is linked in-frame to the protein of the invention.

[0141] 4.8 Gene Therapy

[0142] Mutations in the polynucleotides of the invention gene may result in loss of normal function of the encoded protein. The invention thus provides gene therapy to restore normal activity of the polypeptides of the invention; or to treat disease states involving polypeptides of the invention. Delivery of a functional gene encoding polypeptides of the invention to appropriate cells is effected ex vivo, in situ, or in vivo by use of vectors, and more particularly viral vectors (e.g., adenovirus, adeno-associated virus, or a retrovirus), or ex vivo by use of physical DNA transfer methods (e.g., liposomes or chemical treatments). See, for example, Anderson, Nature, supplement to vol.392, no. 6679, pp.25-20 (1998). For additional reviews of gene therapy technology see Friedmann, Science, 244: 1275-1281 (1989); Verma, Scientific American: 68-84 (1990); and Miller, Nature, 357: 455460 (1992). Introduction of any one of the nucleotides of the present invention or a gene encoding the polypeptides of the present invention can also be accomplished with extrachromosomal substrates (transient expression) or artificial chromosomes (stable expression). Cells may also be cultured ex vivo in the presence of proteins of the present invention in order to proliferate or to produce a desired effect on or activity in such cells. Treated cells can then be introduced in vivo for therapeutic purposes. Alternatively, it is contemplated that in other human disease states, preventing the expression of or inhibiting the activity of polypeptides of the invention will be useful in treating the disease states. It is contemplated that antisense therapy or gene therapy could be applied to negatively regulate the expression of polypeptides of the invention.

[0143] Other methods inhibiting expression of a protein include the introduction of antisense molecules to the nucleic acids of the present invention, their complements, or their translated RNA sequences, by methods known in the art. Further, the polypeptides of the present invention can be inhibited by using targeted deletion methods, or the insertion of a negative regulatory element such as a silencer, which is tissue specific.

[0144] The present invention still further provides cells genetically engineered in vivo to express the polynucleotides of the invention, wherein such polynucleotides are in operative association with a regulatory sequence heterologous to the host cell which drives expression of the polynucleotides in the cell. These methods can be used to increase or decrease the expression of the polynucleotides of the present invention.

[0145] Knowledge of DNA sequences provided by the invention allows for modification of cells to permit, increase, or decrease, expression of endogenous polypeptide. Cells can be modified (e.g., by homologous recombination) to provide increased polypeptide expression by replacing, in whole or in part, the naturally occurring promoter with all or part of a heterologous promoter so that the cells express the protein at higher levels. The heterologous promoter is inserted in such a manner that it is operatively linked to the desired protein encoding sequences. See, for example, PCT International Publication No. WO 94/12650, PCT International Publication No. WO 92/20808, and PCT International Publication No. WO 91/09955. It is also contemplated that, in addition to heterologous promoter DNA, amplifiable marker DNA (e.g., ada, dhfr, and the multifunctional CAD gene which encodes carbamyl phosphate synthase, aspartate transcarbamylase, and dihydroorotase) and/or intron DNA may be inserted along with the heterologous promoter DNA. If linked to the desired protein coding sequence, amplification of the marker DNA by standard selection methods results in co-amplification of the desired protein coding sequences in the cells.

[0146] In another embodiment of the present invention, cells and tissues may be engineered to express an endogenous gene comprising the polynucleotides of the invention under the control of inducible regulatory elements, in which case the regulatory sequences of the endogenous gene may be replaced by homologous recombination. As described herein, gene targeting can be used to replace a gene's existing regulatory region with a regulatory sequence isolated from a different gene or a novel regulatory sequence synthesized by genetic engineering methods. Such regulatory sequences may be comprised of promoters, enhancers, scaffold-attachment regions, negative regulatory elements, transcriptional initiation sites, regulatory protein binding sites or combinations of said sequences. Alternatively, sequences which affect the structure or stability of the RNA or protein produced may be replaced, removed, added, or otherwise modified by targeting. These sequences include polyadenylation signals, mRNA stability elements, splice sites, leader sequences for enhancing or modifying transport or secretion properties of the protein, or other sequences which alter or improve the function or stability of protein or RNA molecules.

[0147] The targeting event may be a simple insertion of the regulatory sequence, placing the gene under the control of the new regulatory sequence, e.g., inserting a new promoter or enhancer or both upstream of a gene. Alteratively, the targeting event may be a simple deletion of a regulatory element, such as the deletion of a tissue-specific negative regulatory element. Alternatively, the targeting event may replace an existing element, for example, a tissue-specific enhancer can be replaced by an enhancer that has broader or different cell-type specificity than the naturally occurring elements. Here, the naturally occurring sequences are deleted and new sequences are added. In all cases, the identification of the targeting event may be facilitated by the use of one or more selectable marker genes that are contiguous with the targeting DNA, allowing for the selection of cells in which the exogenous DNA has integrated into the cell genome. The identification of the targeting event may also be facilitated by the use of one or more marker genes exhibiting the property of negative selection, such that the negatively selectable marker is linked to the exogenous DNA, but configured such that the negatively selectable marker flanks the targeting sequence, and such that a correct homologous recombination event with sequences in the host cell genome does not result in the stable integration of the negatively selectable marker. Markers useful for this purpose include the Herpes Simplex Virus thymidine kinase (TK) gene or the bacterial xanthine-guanine phosphoribosyl-transferase (gpt) gene.

[0148] The gene targeting or gene activation techniques which can be used in accordance with this aspect of the invention are more particularly described in U.S. Pat. No. 5,272,071 to Chappel; U.S. Pat. No. 5,578,461 to Sherwin et al.; International Application No. PCT/US92/09627 (WO93/09222) by Selden et al.; and International Application No. PCT/US90/06436 (WO91/06667) by Skoultchi et al., each of which is incorporated by reference herein in its entirety.

[0149] 4.9 Transgenic Animals

[0150] In preferred methods to determine biological functions of the polypeptides of the invention in vivo, one or more genes provided by the invention are either over expressed or inactivated in the germ line of animals using homologous recombination [Capecchi, Science 244:1288-1292 (1989)]. Animals in which the gene is over expressed, under the regulatory control of exogenous or endogenous promoter elements, are known as transgenic animals. Animals in which an endogenous gene has been inactivated by homologous recombination are referred to as “knockout” animals. Knockout animals, preferably non-human mammals, can be prepared as described in U.S. Pat. No. 5,557,032, incorporated herein by reference. Transgenic animals are useful to determine the roles polypeptides of the invention play in biological processes, and preferably in disease states. Transgenic animals are useful as model systems to identify compounds that modulate lipid metabolism. Transgenic animals, preferably non-human mammals, are produced using methods as described in U.S. Pat. No 5,489,743 and PCT Publication No. WO94/28122, incorporated herein by reference.

[0151] Transgenic animals can be prepared wherein all or part of a promoter of the polynucleotides of the invention is either activated or inactivated to alter the level of expression of the polypeptides of the invention. Inactivation can be carried out using homologous recombination methods described above. Activation can be achieved by supplementing or even replacing the homologous promoter to provide for increased protein expression. The homologous promoter can be supplemented by insertion of one or more heterologous enhancer elements known to confer promoter activation in a particular tissue.

[0152] The polynucleotides of the present invention also make possible the development, through, e.g., homologous recombination or knock out strategies, of animals that fail to express polypeptides of the invention or that express a variant polypeptide. Such animals are useful as models for studying the in vivo activities of polypeptide as well as for studying modulators of the polypeptides of the invention.

[0153] In preferred methods to determine biological functions of the polypeptides of the invention in vivo, one or more genes provided by the invention are either over expressed or inactivated in the germ line of animals using homologous recombination [Capecchi, Science 244:1288-1292 (1989)]. Animals in which the gene is over expressed, under the regulatory control of exogenous or endogenous promoter elements, are known as transgenic animals. Animals in which an endogenous gene has been inactivated by homologous recombination are referred to as “knockout” animals. Knockout animals, preferably non-human mammals, can be prepared as described in U.S. Pat. No. 5,557,032, incorporated herein by reference. Transgenic animals are useful to determine the roles polypeptides of the invention play in biological processes, and preferably in disease states. Transgenic animals are useful as model systems to identify compounds that modulate lipid metabolism. Transgenic animals, preferably non-human mammals, are produced using methods as described in U.S. Pat. No 5,489,743 and PCT Publication No. WO94/28122, incorporated herein by reference.

[0154] Transgenic animals can be prepared wherein all or part of the polynucleotides of the invention promoter is either activated or inactivated to alter the level of expression of the polypeptides of the invention. Inactivation can be carried out using homologous recombination methods described above. Activation can be achieved by supplementing or even replacing the homologous promoter to provide for increased protein expression. The homologous promoter can be supplemented by insertion of one or more heterologous enhancer elements known to confer promoter activation in a particular tissue.

[0155] 4.10 Uses and Biological Activity

[0156] The polynucleotides and proteins of the present invention are expected to exhibit one or more of the uses or biological activities (including those associated with assays cited herein) identified herein. Uses or activities described for proteins of the present invention may be provided by administration or use of such proteins or of polynucleotides encoding such proteins (such as, for example, in gene therapies or vectors suitable for introduction of DNA). The mechanism underlying the particular condition or pathology will dictate whether the polypeptides of the invention, the polynucleotides of the invention or modulators (activators or inhibitors) thereof would be beneficial to the subject in need of treatment. Thus, “therapeutic compositions of the invention” include compositions comprising isolated polynucleotides (including recombinant DNA molecules, cloned genes and degenerate variants thereof) or polypeptides of the invention (including full length protein, mature protein and truncations or domains thereof), or compounds and other substances that modulate the overall activity of the target gene products, either at the level of target gene/protein expression or target protein activity. Such modulators include polypeptides, analogs, (variants), including fragments and fusion proteins, antibodies and other binding proteins; chemical compounds that directly or indirectly activate or inhibit the polypeptides of the invention (identified, e.g., via drug screening assays as described herein); antisense polynucleotides and polynucleotides suitable for triple helix formation; and in particular antibodies or other binding partners that specifically recognize one or more epitopes of the polypeptides of the invention.

[0157] The polypeptides of the present invention may likewise be involved in cellular activation or in one of the other physiological pathways described herein.

[0158] 4.10.1 Research Uses and Utilities

[0159] The polynucleotides provided by the present invention can be used by the research community for various purposes. The polynucleotides can be used to express recombinant protein for analysis, characterization or therapeutic use; as markers for tissues in which the corresponding protein is preferentially expressed (either constitutively or at a particular stage of tissue differentiation or development or in disease states); as molecular weight markers on gels; as chromosome markers or tags (when labeled) to identify chromosomes or to map related gene positions; to compare with endogenous DNA sequences in patients to identify potential genetic disorders; as probes to hybridize and thus discover novel, related DNA sequences; as a source of information to derive PCR primers for genetic fingerprinting; as a probe to “subtract-out” known sequences in the process of discovering other novel polynucleotides; for selecting and making oligomers for attachment to a “gene chip” or other support, including for examination of expression patterns; to raise anti-protein antibodies using DNA immunization techniques; and as an antigen to raise anti-DNA antibodies or elicit another immune response. Where the polynucleotide encodes a protein which binds or potentially binds to another protein (such as, for example, in a receptor-ligand interaction), the polynucleotide can also be used in interaction trap assays (such as, for example, that described in Gyuris et al., Cell 75:791-803 (1993)) to identify polynucleotides encoding the other protein with which binding occurs or to identify inhibitors of the binding interaction.

[0160] The polypeptides provided by the present invention can similarly be used in assays to determine biological activity, including in a panel of multiple proteins for high-throughput screening; to raise antibodies or to elicit another immune response; as a reagent (including the labeled reagent) in assays designed to quantitatively determine levels of the protein (or its receptor) in biological fluids; as markers for tissues in which the corresponding polypeptide is preferentially expressed (either constitutively or at a particular stage of tissue differentiation or development or in a disease state); and, of course, to isolate correlative receptors or ligands. Proteins involved in these binding interactions can also be used to screen for peptide or small molecule inhibitors or agonists of the binding interaction.

[0161] Any or all of these research utilities are capable of being developed into reagent grade or kit format for commercialization as research products.

[0162] Methods for performing the uses listed above are well known to those skilled in the art. References disclosing such methods include without limitation “Molecular Cloning: A Laboratory Manual”, 2d ed., Cold Spring Harbor Laboratory Press, Sambrook, J., E. F. Fritsch and T. Maniatis eds., 1989, and “Methods in Enzymology: Guide to Molecular Cloning Techniques”, Academic Press, Berger, S. L. and A. R. Kimmel eds., 1987.

[0163] 4.10.2 Nutritional Uses

[0164] Polynucleotides and polypeptides of the present invention can also be used as nutritional sources or supplements. Such uses include without limitation use as a protein or amino acid supplement, use as a carbon source, use as a nitrogen source and use as a source of carbohydrate. In such cases the polypeptide or polynucleotide of the invention can be added to the feed of a particular organism or can be administered as a separate solid or liquid preparation, such as in the form of powder, pills, solutions, suspensions or capsules. In the case of microorganisms, the polypeptide or polynucleotide of the invention can be added to the medium in or on which the microorganism is cultured.

[0165] 4.10.3 Cytokine and Cell Proliferation/Differentiation Activity

[0166] A polypeptide of the present invention may exhibit activity relating to cytokine, cell proliferation (either inducing or inhibiting) or cell differentiation (either inducing or inhibiting) activity or may induce production of other cytokines in certain cell populations. A polynucleotide of the invention can encode a polypeptide exhibiting such attributes. Many protein factors discovered to date, including all known cytokines, have exhibited activity in one or more factor-dependent cell proliferation assays, and hence the assays serve as a convenient confirmation of cytokine activity. The activity of therapeutic compositions of the present invention is evidenced by any one of a number of routine factor dependent cell proliferation assays for cell lines including, without limitation, 32D, DA2, DA1G, T10, B9, B9/11, BaF3, MC9/G, M+(preB M+), 2E8, RB5, DA1, 123, T1165, HT2, CTLL2, TF-1, Mo7e, CMK, HUVEC, and Caco. Therapeutic compositions of the invention can be used in the following:

[0167] Assays for T-cell or thymocyte proliferation include without limitation those described in: Current Protocols in Immunology, Ed by J. E. Coligan, A. M. Kruisbeek, D. H. Margulies, E. M. Shevach, W. Strober, Pub. Greene Publishing Associates and Wiley-Interscience (Chapter 3, In Vitro assays for Mouse Lymphocyte Function 3.1-3.19; Chapter 7, Immunologic studies in Humans); Takai et al., J. Immunol. 137:3494-3500, 1986; Bertagnolli et al., J. Immunol. 145:1706-1712, 1990; Bertagnolli et al., Cellular Immunology 133:327-341, 1991; Bertagnolli, et al., I. Immunol. 149:3778-3783,1992; Bowman et al., I. Immunol. 152:1756-1761, 1994.

[0168] Assays for cytokine production and/or proliferation of spleen cells, lymph node cells or thymocytes include, without limitation, those described in: Polyclonal T cell stimulation, Kruisbeek, A. M. and Shevach, E. M. In Current Protocols in Immunology. J. E. e.a. Coligan eds. Vol 1 pp. 3.12.1-3.12.14, John Wiley and Sons, Toronto. 1994; and Measurement of mouse and human interleukin-γ, Schreiber, R. D. In Current Protocols in Immunology. J. E. e.a. Coligan eds. Vol 1 pp. 6.8.1-6.8.8, John Wiley and Sons, Toronto. 1994.

[0169] Assays for proliferation and differentiation of hematopoietic and lymphopoietic cells include, without limitation, those described in: Measurement of Human and Murine Interleukin 2 and Interleukin 4, Bottomly, K., Davis, L. S. and Lipsky, P. E. In Current Protocols in Immunology. J. E. e.a. Coligan eds. Vol 1 pp.6.3.1-6.3.12, John Wiley and Sons, Toronto. 1991; deVries et al., J. Exp. Med. 173:1205-1211, 1991; Moreau et al., Nature 336:690-692, 1988; Greenberger et al., Proc. Natl. Acad. Sci. U.S.A. 80:2931-2938, 1983; Measurement of mouse and human interleukin 6—Nordan, R. In Current Protocols in Immunology. J. E. Coligan eds. Vol 1 pp. 6.6.1-6.6.5, John Wiley and Sons, Toronto. 1991; Smith et al., Proc. Natl. Aced. Sci. U.S.A. 83:1857-1861, 1986; Measurement of human Interleukin 11—Bennett, F., Giannotti, J., Clark, S. C. and Turner, K. J. In Current Protocols in Immunology. J. E. Coligan eds. Vol 1 pp. 6.15.1 John Wiley and Sons, Toronto. 1991; Measurement of mouse and human Interleukin 9—Ciarletta, A., Giarnotti, J., Clark, S. C. and Turner, K. J. In Current Protocols in Immunology. J. E. Coligan eds. Vol 1 pp. 6.13.1, John Wiley and Sons, Toronto. 1991.

[0170] Assays for T-cell clone responses to antigens (which will identify, among others, proteins that affect APC-T cell interactions as well as direct T-cell effects by measuring proliferation and cytokine production) include, without limitation, those described in: Current Protocols in Immunology, Ed by J. E. Coligan, A. M. Kruisbeek, D. H. Margulies, E. M. Shevach, W Strober, Pub. Greene Publishing Associates and Wiley-Interscience (Chapter 3, In Vitro assays for Mouse Lymphocyte Function; Chapter 6, Cytokines and their cellular receptors; Chapter 7, Immunologic studies in Humans); Weinberger et al., Proc. Natl. Acad. Sci. USA 77:6091-6095, 1980; Weinberger et al., Eur. J. Immun.. 11 :405-411, 198 1; Takai et al., J. Immunol. 137:3494-3500, 1986; Takai et al., J. Immunol. 140:508-512, 1988.

[0171] 4.10.4 Stem Cell Growth Factor Activity

[0172] A polypeptide of the present invention may exhibit stem cell growth factor activity and be involved in the proliferation, differentiation and survival of pluripotent and totipotent stem cells including primordial germ cells, embryonic stem cells, hematopoietic stem cells and/or germ line stem cells. Administration of the polypeptide of the invention to stem cells in vivo or ex vivo is expected to maintain and expand cell populations in a totipotential or pluripotential state which would be useful for re-engineering damaged or diseased tissues, transplantation, manufacture of bio-pharmaceuticals and the development of bio-sensors. The ability to produce large quantities of human cells has important working applications for the production of human proteins which currently must be obtained from non-human sources or donors, implantation of cells to treat diseases such as Parkinson's, Alzheimer's and other neurodegenerative diseases; tissues for grafting such as bone marrow, skin, cartilage, tendons, bone, muscle (including cardiac muscle), blood vessels, cornea, neural cells, gastrointestinal cells and others; and organs for transplantation such as kidney, liver, pancreas (including islet cells), heart and lung.

[0173] It is contemplated that multiple different exogenous growth factors and/or cytokines may be administered in combination with the polypeptide of the invention to achieve the desired effect, including any of the growth factors listed herein, other stem cell maintenance factors, and specifically including stem cell factor (SCF), leukemia inhibitory factor (LIF), Flt-3 ligand (Flt-3L), any of the interleukins, recombinant soluble IL-6 receptor fused to IL-6, macrophage inflammatory protein 1-alpha (MIP-1-alpha), G-CSF, GM-CSF, thrombopoietin (TPO), platelet factor 4 (PF-4), platelet-derived growth factor (PDGF), neural growth factors and basic fibroblast growth factor (bFGF).

[0174] Since totipotent stem cells can give rise to virtually any mature cell type, expansion of these cells in culture will facilitate the production of large quantities of mature cells. Techniques for culturing stem cells are known in the art and administration of polypeptides of the invention, optionally with other growth factors and/or cytokines, is expected to enhance the survival and proliferation of the stem cell populations. This can be accomplished by direct administration of the polypeptide of the invention to the culture medium. Alternatively, stroma cells transfected with a polynucleotide that encodes for the polypeptide of the invention can be used as a feeder layer for the stem cell populations in culture or in vivo. Stromal support cells for feeder layers may include embryonic bone marrow fibroblasts, bone marrow stromal cells, fetal liver cells, or cultured embryonic fibroblasts (see U.S. Pat. No. 5,690,926).

[0175] Stem cells themselves can be transfected with a polynucleotide of the invention to induce autocrine expression of the polypeptide of the invention. This will allow for generation of undifferentiated totipotential/pluripotential stem cell lines that are useful as is or that can then be differentiated into the desired mature cell types. These stable cell lines can also serve as a source of undifferentiated totipotential/pluripotential mRNA to create cDNA libraries and templates for polymerase chain reaction experiments. These studies would allow for the isolation and identification of differentially expressed genes in stem cell populations that regulate stem cell proliferation and/or maintenance.

[0176] Expansion and maintenance of totipotent stem cell populations will be useful in the treatment of many pathological conditions. For example, polypeptides of the present invention may be used to manipulate stem cells in culture to give rise to neuroepithelial cells that can be used to augment or replace cells damaged by illness, autoimmune disease, accidental damage or genetic disorders. The polypeptide of the invention may be useful for inducing the proliferation of neural cells and for the regeneration of nerve and brain tissue, i.e. for the treatment of central and peripheral nervous system diseases and neuropathies, as well as mechanical and traumatic disorders which involve degeneration, death or trauma to neural cells or nerve tissue. In addition, the expanded stem cell populations can also be genetically altered for gene therapy purposes and to decrease host rejection of replacement tissues after grafting or implantation.

[0177] Expression of the polypeptide of the invention and its effect on stem cel Is can also be manipulated to achieve controlled differentiation of the stem cells into more differentiated cell types. A broadly applicable method of obtaining pure populations of a specific differentiated cell type from undifferentiated stem cell populations involves the use of a cell-type specific promoter driving a selectable marker. The selectable marker allows only cells of the desired type to survive. For example, stem cells can be induced to differentiate into cardiomyocytes (Wobus et al., Differentiation, 48: 173-182, (1991); Klug et al., J. Clin. Invest., 98(1): 216-224, (1999)) or skeletal muscle cells (Browder, L. W. In: Principles of Tissue Engineering eds. Lanza et al., Academic Press (1997)). Alternatively, directed differentiation of stem cells can be accomplished by culturing the stem cells in the presence of a differentiation factor such as retinoic acid and an antagonist of the polypeptide of the invention which would inhibit the effects of endogenous stem cell factor activity and allow differentiation to proceed.

[0178] In vitro cultures of stem cells can be used to determine if the polypeptide of the invention exhibits stem cell growth factor activity. Stem cells are isolated from any one of various cell sources (including hematopoietic stem cells and embryonic stem cells) and cultured on a feeder layer, as described by Thompson et al. Proc. Natl. Acad. Sci, U.S.A., 92: 7844-7848 (1995), in the presence of the polypeptide of the invention alone or in combination with other growth factors or cytokines. The ability of the polypeptide of the invention to induce stem cells proliferation is determined by colony formation on semi-solid support e.g. as described by Bernstein et al., Blood, 77: 2316-2321 (1991).

[0179] 4.10.5 Hematopoiesis Regulating Activity

[0180] A polypeptide of the present invention may be involved in regulation of hematopoiesis and, consequently, in the treatment of myeloid or lymphoid cell disorders. Even marginal biological activity in support of colony forming cells or of factor-dependent cell lines indicates involvement in regulating hematopoiesis, e.g. in supporting the growth and proliferation of erythroid progenitor cells alone or in combination with other cytokines, thereby indicating utility, for example, in treating various anemias or for use in conjunction with irradiation/chemotherapy to stimulate the production of erythroid precursors and/or erythroid cells; in supporting the growth and proliferation of myeloid cells such as granulocytes and monocytes/macrophages (i.e., traditional CSF activity) useful, for example, in conjunction with chemotherapy to prevent or treat consequent myelo-suppression; in supporting the growth and proliferation of megakaryocytes and consequently of platelets thereby allowing prevention or treatment of various platelet disorders such as thrombocytopenia, and generally for use in place of or complimentary to platelet transfusions; and/or in supporting the growth and proliferation of hematopoietic stem cells which are capable of maturing to any and all of the above-mentioned hematopoietic cells and therefore find therapeutic utility in various stem cell disorders (such as those usually treated with transplantation, including, without limitation, aplastic anemia and paroxysmal nocturnal hemoglobinuria), as well as in repopulating the stem cell compartment post irradiation/chemotherapy, either in-vivo or ex-vivo (i.e., in conjunction with bone marrow transplantation or with peripheral progenitor cell transplantation (homologous or heterologous)) as normal cells or genetically manipulated for gene therapy.

[0181] Therapeutic compositions of the invention can be used in the following:

[0182] Suitable assays for proliferation and differentiation of various hematopoietic lines are cited above.

[0183] Assays for embryonic stem cell differentiation (which will identify, among others, proteins that influence embryonic differentiation hematopoiesis) include, without limitation, those described in: Johansson et al. Cellular Biology 15:141-151, 1995; Keller et al., Molecular and Cellular Biology 13:473-486, 1993; McClanahan et al., Blood 81:2903-2915, 1993.

[0184] Assays for stem cell survival and differentiation (which will identify, among others, proteins that regulate lympho-hematopoiesis) include, without limitation, those described in:

[0185] Methylcellulose colony forming assays, Freshney, M. G. In Culture of Hematopoietic Cells. R. I.

[0186] Freshney, et al. eds. Vol pp. 265-268, Wiley-Liss, Inc., New York, N.Y. 1994; Hirayama et al., Proc. Natl. Acad. Sci. USA 89:5907-5911, 1992; Primitive hematopoietic colony forming cells with high proliferative potential, McNiece, I. K. and Briddell, R. A. In Culture of Hematopoietic Cells. R. I. Freshney, et al. eds. Vol pp. 23-39, Wiley-Liss, Inc., New York, N.Y. 1994; Neben et al., Experimental Hematology 22:353-359, 1994; Cobblestone area forming cell assay, Ploemacher, R. E. In Culture of Hematopoietic Cells. R. I. Freshney, et al. eds. Vol pp. 1-21, Wiley-Liss, Inc., New York, N.Y. 1994; Long term bone marrow cultures in the presence of stromal cells, Spooncer, E., Dexter, M. and Allen, T. In Culture of Hematopoietic Cells. R. I. Freshney, et al. eds. Vol pp. 163-179, Wiley-Liss, Inc., New York, N.Y. 1994; Long term culture initiating cell assay, Sutherland, H. J. In Culture of Hematopoietic Cells. R. I. Freshney, et al. eds. Vol pp.139-162, Wiley-Liss, Inc., New York, N.Y. 1994.

[0187] 4.10.6 Tissue Growth Activity

[0188] A polypeptide of the present invention also may be involved in bone, cartilage, tendon, ligament and/or nerve tissue growth or regeneration, as well as in wound healing and tissue repair and replacement, and in healing of bums, incisions and ulcers.

[0189] A polypeptide of the present invention which induces cartilage and/or bone growth in circumstances where bone is not normally formed, has application in the healing of bone fractures and cartilage damage or defects in humans and other animals. Compositions of a polypeptide, antibody, binding partner, or other modulator of the invention may have prophylactic use in closed as well as open fracture reduction and also in the improved fixation of artificial joints. De novo bone formation induced by an osteogenic agent contributes to the repair of congenital, trauma induced, or oncologic resection induced craniofacial defects, and also is useful in cosmetic plastic surgery.

[0190] A polypeptide of this invention may also be involved in attracting bone-forming cells, stimulating growth of bone-forming cells, or inducing differentiation of progenitors of bone-forming cells. Treatment of osteoporosis, osteoarthritis, bone degenerative disorders, or periodontal disease, such as through stimulation of bone and/or cartilage repair or by blocking inflammation or processes of tissue destruction (collagenase activity, osteoclast activity, etc.) mediated by inflammatory processes may also be possible using the composition of the invention.

[0191] Another category of tissue regeneration activity that may involve the polypeptide of the present invention is tendon/ligament formation. Induction of tendon/ligament-like tissue or other tissue formation in circumstances where such tissue is not normally formed, has application in the healing of tendon or ligament tears, deformities and other tendon or ligament defects in humans and other animals. Such a preparation employing a tendon/ligament-like tissue inducing protein may have prophylactic use in preventing damage to tendon or ligament tissue, as well as use in the improved fixation of tendon or ligament to bone or other tissues, and in repairing defects to tendon or ligament tissue. De novo tendon/ligament-like tissue formation induced by a composition of the present invention contributes to the repair of congenital, trauma induced, or other tendon or ligament defects of other origin, and is also useful in cosmetic plastic surgery for attachment or repair of tendons or ligaments. The compositions of the present invention may provide environment to attract tendon- or ligament-forming cells, stimulate growth of tendon- or ligament-forming cells, induce differentiation of progenitors of tendon- or ligament-forming cells, or induce growth of tendon/ligament cells or progenitors ex vivo for return in vivo to effect tissue repair. The compositions of the invention may also be useful in the treatment of tendinitis, carpal tunnel syndrome and other tendon or ligament defects. The compositions may also include an appropriate matrix and/or sequestering agent as a carrier as is well known in the art.

[0192] The compositions of the present invention may also be useful for proliferation of neural cells and for regeneration of nerve and brain tissue, i.e. for the treatment of central and peripheral nervous system diseases and neuropathies, as well as mechanical and traumatic disorders, which involve degeneration, death or trauma to neural cells or nerve tissue. More specifically, a composition may be used in the treatment of diseases of the peripheral nervous system, such as peripheral nerve injuries, peripheral neuropathy and localized neuropathies, and central nervous system diseases, such as Alzheimer's, Parkinson's disease, Huntington's disease, amyotrophic lateral sclerosis, and Shy-Drager syndrome. Further conditions which may be treated in accordance with the present invention include mechanical and traumatic disorders, such as spinal cord disorders, head trauma and cerebrovascular diseases such as stroke. Peripheral neuropathies resulting from chemotherapy or other medical therapies may also be treatable using a composition of the invention.

[0193] Compositions of the invention may also be useful to promote better or faster closure of non-healing wounds, including without limitation pressure ulcers, ulcers associated with vascular insufficiency, surgical and traumatic wounds, and the like.

[0194] Compositions of the present invention may also be involved in the generation or regeneration of other tissues, such as organs (including, for example, pancreas, liver, intestine, kidney, skin, endothelium), muscle (smooth, skeletal or cardiac) and vascular (including vascular endothelium) tissue, or for promoting the growth of cells comprising such tissues. Part of the desired effects may be by inhibition or modulation of fibrotic scarring may allow normal tissue to regenerate. A polypeptide of the present invention may also exhibit angiogenic activity.

[0195] A composition of the present invention may also be useful for gut protection or regeneration and treatment of lung or liver fibrosis, reperfusion injury in various tissues, and conditions resulting from systemic cytokine damage.

[0196] A composition of the present invention may also be useful for promoting or inhibiting differentiation of tissues described above from precursor tissues or cells; or for inhibiting the growth of tissues described above.

[0197] Therapeutic compositions of the invention can be used in the following:

[0198] Assays for tissue generation activity include, without limitation, those described in: International Patent Publication No. WO95/16035 (bone, cartilage, tendon); International Patent Publication No. WO95/05846 (nerve, neuronal); International Patent Publication No. WO91/07491 (skin, endotheliurn).

[0199] Assays for wound healing activity include, without limitation, those described in: Winter, Epidermal Wound Healing, pps. 71-112 (Maibach, H. I. and Rovee, D. T., eds.), Year Book Medical Publishers, Inc., Chicago, as modified by Eaglstein and Mertz, J. Invest. Dermatol 71:382-84 (1978).

[0200] 4.10.7 Immune Stimulating or Suppressing Activity

[0201] A polypeptide of the present invention may also exhibit immune stimulating or immune suppressing activity, including without limitation the activities for which assays are described herein. A polynucleotide of the invention can encode a polypeptide exhibiting such activities. A protein may be useful in the treatment of various immune deficiencies and disorders (including severe combined immunodeficiency (SCID)), e.g., in regulating (up or down) growth and proliferation of T and/or B lymphocytes, as well as effecting the cytolytic activity of NK cells and other cell populations. These immune deficiencies may be genetic or be caused by viral (e.g., HIV) as well as bacterial or fungal infections, or may result from autoimmune disorders. More specifically, infectious diseases causes by viral, bacterial, fungal or other infection may be treatable using a protein of the present invention, including infections by HIV, hepatitis viruses, herpes viruses, mycobacteria, Leishmania spp., malaria spp. and various fungal infections such as candidiasis. Of course, in this regard, proteins of the present invention may also be useful where a boost to the immune system generally may be desirable, i.e., in the treatment of cancer.

[0202] Autoimmune disorders which may be treated using a protein of the present invention include, for example, connective tissue disease, multiple sclerosis, systemic lupus erythematosus, rheumatoid arthritis, autoimmune pulmonary inflammation, Guillain-Barre syndrome, autoimmune thyroiditis, insulin dependent diabetes mellitis, myasthenia gravis, graft-versus-host disease and autoimmune inflammatory eye disease. Such a protein (or antagonists thereof, including antibodies) of the present invention may also to be useful in the treatment of allergic reactions and conditions (e.g., anaphylaxis, serum sickness, drug reactions, food allergies, insect venom allergies, mastocytosis, allergic rhinitis, hypersensitivity pneumonitis, urticaria, angioedema, eczema, atopic dermatitis, allergic contact dermatitis, erythema multiforme, Stevens-Johnson syndrome, allergic conjunctivitis, atopic keratoconjunctivitis, venereal keratoconjunctivitis, giant papillary conjunctivitis and contact allergies), such as asthma (particularly allergic asthma) or other respiratory problems. Other conditions, in which immune suppression is desired (including, for example, organ transplantation), may also be treatable using a protein (or antagonists thereof) of the present invention. The therapeutic effects of the polypeptides or antagonists thereof on allergic reactions can be evaluated by in vivo animals models such as the cumulative contact enhancement test (Lastbom et al., Toxicology 125: 59-66, 1998), skin prick test (Hoffmann et al., Allergy 54: 446-54, 1999), guinea pig skin sensitization test (Vohr et al., Arch. Toxocol. 73: 501-9), and murine local lymph node assay (Kimber et al., J. Toxicol. Environ. Health 53: 563-79).

[0203] Using the proteins of the invention it may also be possible to modulate immune responses, in a number of ways. Down regulation may be in the form of inhibiting or blocking an immune response already in progress or may involve preventing the induction of an immune response. The functions of activated T cells may be inhibited by suppressing T cell responses or by inducing specific tolerance in T cells, or both. Immunosuppression of T cell responses is generally an active, non-antigen-specific, process which requires continuous exposure of the T cells to the suppressive agent. Tolerance, which involves inducing non-responsiveness or anergy in T cells, is distinguishable from immunosuppression in that it is generally antigen-specific and persists after exposure to the tolerizing agent has ceased. Operationally, tolerance can be demonstrated by the lack of a T cell response upon reexposure to specific antigen in the absence of the tolerizing agent.

[0204] Down regulating or preventing one or more antigen functions (including without limitation B lymphocyte antigen functions (such as, for example, B7)), e.g., preventing high level lymphokine synthesis by activated T cells, will be useful in situations of tissue, skin and organ transplantation and in graft-versus-host disease (GVHD). For example, blockage of T cell function should result in reduced tissue destruction in tissue transplantation. Typically, in tissue transplants, rejection of the transplant is initiated through its recognition as foreign by T cells, followed by an immune reaction that destroys the transplant. The administration of a therapeutic composition of the invention may prevent cytokine synthesis by immune cells, such as T cells, and thus acts as an immunosuppressant. Moreover, a lack of costimulation may also be sufficient to anergize the T cells, thereby inducing tolerance in a subject. Induction of long-term tolerance by B lymphocyte antigen-blocking reagents may avoid the necessity of repeated administration of these blocking reagents. To achieve sufficient immunosuppression or tolerance in a subject, it may also be necessary to block the function of a combination of B lymphocyte antigens.

[0205] The efficacy of particular therapeutic compositions in preventing organ transplant rejection or GVHD can be assessed using animal models that are predictive of efficacy in humans. Examples of appropriate systems which can be used include allogeneic cardiac grafts in rats and xenogeneic pancreatic islet cell grafts in mice, both of which have been used to examine the immunosuppressive effects of CTLA41g fusion proteins in vivo as described in Lenschow et al., Science 257:789-792 (1992) and Turka et al., Proc. Natl. Acad. Sci USA, 89:11102-11105 (1992). In addition, murine models of GVHD (see Paul ed., Fundamental Immunology, Raven Press, New York, 1989, pp. 846-847) can be used to determine the effect of therapeutic compositions of the invention on the development of that disease.

[0206] Blocking antigen function may also be therapeutically useful for treating autoimmune diseases. Many autoimmune disorders are the result of inappropriate activation of T cells that are reactive against self tissue and which promote the production of cytokines and autoantibodies involved in the pathology of the diseases. Preventing the activation of autoreactive T cells may reduce or eliminate disease symptoms. Administration of reagents which block stimulation of T cells can be used to inhibit T cell activation and prevent production of autoantibodies or T cell-derived cytokines which may be involved in the disease process. Additionally, blocking reagents may induce antigen-specific tolerance of autoreactive T cells which could lead to long-term relief from the disease. The efficacy of blocking reagents in preventing or alleviating autoimmune disorders can be determined using a number of well-characterized animal models of human autoimmune diseases. Examples include murine experimental autoimmune encephalitis, systemic lupus erythmatosis in MRL/lpr/lpr mice or NZB hybrid mice, murine autoimmune collagen arthritis, diabetes mellitus in NOD mice and BB rats, and murine experimental myasthenia gravis (see Paul ed., Fundamental Immunology, Raven Press, New York, 1989, pp. 840-856).

[0207] Upregulation of an antigen function (e.g., a B lymphocyte antigen function), as a means of up regulating immune responses, may also be useful in therapy. Upregulation of immune responses may be in the form of enhancing an existing immune response or eliciting an initial immune response. For example, enhancing an immune response may be useful in cases of viral infection, including systemic viral diseases such as influenza, the common cold, and encephalitis.

[0208] Alternatively, anti-viral immune responses may be enhanced in an infected patient by removing T cells from the patient, costimulating the T cells in vitro with viral antigen-pulsed APCs either expressing a peptide of the present invention or together with a stimulatory form of a soluble peptide of the present invention and reintroducing the in vitro activated T cells into the patient. Another method of enhancing anti-viral immune responses would be to isolate infected cells from a patient, transfect them with a nucleic acid encoding a protein of the present invention as described herein such that the cells express all or a portion of the protein on their surface, and reintroduce the transfected cells into the patient. The infected cells would now be capable of delivering a costimulatory signal to, and thereby activate, T cells in vivo.

[0209] A polypeptide of the present invention may provide the necessary stimulation signal to T cells to induce a T cell mediated immune response against the transfected tumor cells. In addition, tumor cells which lack MHC class I or MHC class II molecules, or which fail to reexpress sufficient mounts of MHC class I or MHC class II molecules, can be transfected with nucleic acid encoding all or a portion of (e.g., a cytoplasmic-domain truncated portion) of an MHC class I alpha chain protein and 2 microglobulin protein or an MHC class II alpha chain protein and an MHC class II beta chain protein to thereby express MHC class I or MHC class II proteins on the cell surface. Expression of the appropriate class I or class II MHC in conjunction with a peptide having the activity of a B lymphocyte antigen (e.g., B7-1, B7-2, B7-3) induces a T cell mediated immune response against the transfected tumor cell. Optionally, a gene encoding an antisense construct which blocks expression of an MHC class H associated protein, such as the invariant chain, can also be cotransfected with a DNA encoding a peptide having the activity of a B lymphocyte antigen to promote presentation of tumor associated antigens and induce tumor specific immunity. Thus, the induction of a T cell mediated immune response in a human subject may be sufficient to overcome tumor-specific tolerance in the subject.

[0210] The activity of a protein of the invention may, among other means, be measured by the following methods:

[0211] Suitable assays for thymocyte or splenocyte cytotoxicity include, without limitation, those described in: Current Protocols in Immunology, Ed by J. E. Coligan, A. M. Kruisbeek, D. H. Margulies, E. M. Shevach, W. Strober, Pub. Greene Publishing Associates and Wiley-lnterscience (Chapter 3, In Vitro assays for Mouse Lymphocyte Function 3.1-3.19; Chapter 7, Immunologic studies in Humans); Herrmann et al., Proc. Natl. Acad. Sci. USA 78:2488-2492, 1981; Herrmann et al., J. Immunol. 128:1968-1974, 1982; Handa et al., J. Immunol. 135:1564-1572, 1985; Takai et al., 1. Immunol. 137:3494-3500, 1986; Takai et al., J. Immunol. 140:508-512, 1988; Bowman et al., J. Virology 61:1992-1998; Bertagnolli et al., Cellular Immunology 133:327-341, 1991; Brown et al., J. Immunol. 153:3079-3092, 1994.

[0212] Assays for T-cell-dependent immunoglobulin responses and isotype switching (which will identify, among others, proteins that modulate T-cell dependent antibody responses and that affect Th1/Th2 profiles) include, without limitation, those described in: Maliszewski, J. Immunol. 144:3028-3033, 1990; and Assays for B cell function: In vitro antibody production, Mond, J. J. and Brunswick, M. In Current Protocols in Immunology. J. E. e.a. Coligan eds. Vol 1 pp.3.8.1-3.8.16, John Wiley and Sons, Toronto. 1994.

[0213] Mixed lymphocyte reaction (MLR) assays (which will identify, among others, proteins that generate predominantly Thl and CTL responses) include, without limitation, those described in: Current Protocols in Immunology, Ed by J. E. Coligan, A. M. Kruisbeek, D. H. Margulies, E. M. Shevach, W. Strober, Pub. Greene Publishing Associates and Wiley-Interscience (Chapter 3, In Vitro assays for Mouse Lymphocyte Function 3.1-3.19; Chapter 7, Immunologic studies in Humans); Takai et al., J. Immunol. 137:3494-3500, 1986; Takai et al., J. Immunol. 140:508-512, 1988; Bertagnolli et al., J. Immunol. 149:3778-3783, 1992.

[0214] Dendritic cell-dependent assays (which will identify, among others, proteins expressed by dendritic cells that activate naive T-cells) include, without limitation, those described in: Guery et al., J. Immunol. 134:536-544, 1995; Inaba et al., Journal of Experimental Medicine 173:549-559, 1991; Macatonia et al., Journal of Immunology 154:5071-5079, 1995; Porgador et al., Journal of Experimental Medicine 182:255-260, 1995; Nair et al., Journal of Virology 67:4062-4069, 1993; Huang et al., Science 264:961-965, 1994; Macatonia et al., Journal of Experimental Medicine 169:1255-1264, 1989; Bhardwaj et al., Journal of Clinical Investigation 94:797-807, 1994; and Inaba et al., Journal of Experimental Medicine 172:631-640, 1990.

[0215] Assays for lymphocyte survival/apoptosis (which will identify, among others, proteins that prevent apoptosis after superantigen induction and proteins that regulate lymphocyte homeostasis) include, without limitation, those described in: Darzynkiewicz et al., Cytometry 13:795-808, 1992; Gorczyca et al., Leukemia 7:659-670, 1993; Gorczyca et al., Cancer Research 53:1945-1951, 1993; Itohetal., Cell 66:233-243, 1991; Zacharchuk, Journal of Immunology 145:4037-4045, 1990; Zamai et al., Cytometry 14:891-897, 1993; Gorczyca et al., International Journal of Oncology 1:639-648, 1992.

[0216] Assays for proteins that influence early steps of T-cell commitment and development include, without limitation, those described in: Antica et al., Blood 84:111-117,1994; Fine et al., Cellular Immunology 155:111-122, 1994; Galy et al., Blood 85:2770-2778, 1995; Toki et al., Proc. Nat. Acad Sci. USA 88:7548-7551, 1991.

[0217] 4.10.8 Activin/Inhibin Activity

[0218] A polypeptide of the present invention may also exhibit activin- or inhibin-related activities. A polynucleotide of the invention may encode a polypeptide exhibiting such characteristics. Inhibins are characterized by their ability to inhibit the release of follicle stimulating hormone (FSH), while activins and are characterized by their ability to stimulate the release of follicle stimulating hormone (FSH). Thus, a polypeptide of the present invention, alone or in heterodimers with a member of the inhibin family, may be useful as a contraceptive based on the ability of inhibins to decrease fertility in female mammals and decrease spermatogenesis in male mammals. Administration of sufficient amounts of other inhibins can induce infertility in these mammals. Alternatively, the polypeptide of the invention, as a homodimer or as a heterodimer with other protein subunits of the inhibin group, may be useful as a fertility inducing therapeutic, based upon the ability of activin molecules in stimulating FSH release from cells of the anterior pituitary. See, for example, U.S. Pat. No. 4,798,885. A polypeptide of the invention may also be useful for advancement of the onset of fertility in sexually in a mature mammals, so as to increase the lifetime reproductive performance of domestic animals such as, but not limited to, cows, sheep and pigs.

[0219] The activity of a polypeptide of the invention may, among other means, be measured by the following methods.

[0220] Assays for activin/inhibin activity include, without limitation, those described in: Vale et al., Endocrinology 91:562-572, 1972; Ling et al., Nature 321:779-782, 1986; Vale et al., Nature 321:776-779, 1986; Mason et al., Nature 318:659-663, 1985; Forage et al., Proc. Natl. Acad. Sci. USA 83:3091-3095, 1986.

[0221] 4.10.9 Chemotactic/Chemokinetic Activity

[0222] A polypeptide of the present invention may be involved in chemotactic or chemokinetic activity for mammalian cells, including, for example, monocytes, fibroblasts, neutrophils, T-cells, mast cells, eosinophils, epithelial and/or endothelial cells. A polynucleotide of the invention can encode a polypeptide exhibiting such attributes. Chemotactic and chemokinetic receptor activation can be used to mobilize or attract a desired cell population to a desired site of action. Chemotactic or chemokinetic compositions (e.g. proteins, antibodies, binding partners, or modulators of the invention) provide particular advantages in treatment of wounds and other trauma to tissues, as well as in treatment of localized infections. For example, attraction of lymphocytes, monocytes or neutrophils to tumors or sites of infection may result in improved immune responses against the tumor or infecting agent.

[0223] A protein or peptide has chemotactic activity for a particular cell population if it can stimulate, directly or indirectly, the directed orientation or movement of such cell population. Preferably, the protein or peptide has the ability to directly stimulate directed movement of cells. Whether a particular protein has chemotactic activity for a population of cells can be readily determined by employing such protein or peptide in any known assay for cell chemotaxis.

[0224] Therapeutic compositions of the invention can be used in the following:

[0225] Assays for chemotactic activity (which will identify proteins that induce or prevent chemotaxis) consist of assays that measure the ability of a protein to induce the migration of cells across a membrane as well as the ability of a protein to induce the adhesion of one cell population to another cell population. Suitable assays for movement and adhesion include, without limitation, those described in: Current Protocols in Immunology, Ed by J. E. Coligan, A. M. Kruisbeek, D. H. Marguiles, E. M. Shevach, W. Strober, Pub. Greene Publishing Associates and Wiley-Interscience (Chapter 6.12, Measurement of alpha and beta Chemokines 6.12.1-6.12.28; Taub et al. J. Clin. Invest. 95:1370-1376, 1995; Lind et al. APMIS 103:140-146, 1995; Muller et al Eur. J. Immunol. 25:1744-1748; Gruber et al. J. of Immunol. 152:5860-5867, 1994; Johnston et al. J. of Immunol. 153:1762-1768, 1994.

[0226] 4.10.10 Hemostatic and Thrombolytic Activity

[0227] A polypeptide of the invention may also be involved in hemostatis or thrombolysis or thrombosis. A polynucleotide of the invention can encode a polypeptide exhibiting such attributes. Compositions may be useful in treatment of various coagulation disorders (including hereditary disorders, such as hemophilias) or to enhance coagulation and other hemostatic events in treating wounds resulting from trauma, surgery or other causes. A composition of the invention may also be useful for dissolving or inhibiting formation of thromboses and for treatment and prevention of conditions resulting therefrom (such as, for example, infarction of cardiac and central nervous system vessels (e.g., stroke).

[0228] Therapeutic compositions of the invention can be used in the following:

[0229] Assay for hemostatic and thrombolytic activity include, without limitation, those described in: Linet et al., J. Clin. Pharmacol. 26:131-140, 1986; Burdick et al., Thrombosis Res. 45:413-419, 1987; Humphrey et al., Fibrinolysis 5:71-79 (1991); Schaub, Prostaglandins 35:467-474, 1988.

[0230] 4.10.11 Cancer Diagnosis and Therapy

[0231] Polypeptides of the invention may be involved in cancer cell generation, proliferation or metastasis. Detection of the presence or amount of polynucleotides or polypeptides of the invention may be useful for the diagnosis and/or prognosis of one or more types of cancer. For example, the presence or increased expression of a polynucleotide/polypeptide of the invention may indicate a hereditary risk of cancer, a precancerous condition, or an ongoing malignancy. Conversely, a defect in the gene or absence of the polypeptide may be associated with a cancer condition. Identification of single nucleotide polymorphisms associated with cancer or a predisposition to cancer may also be useful for diagnosis or prognosis.

[0232] Cancer treatments promote tumor regression by inhibiting tumor cell proliferation, inhibiting angiogenesis (growth of new blood vessels that is necessary to support tumor growth) and/or prohibiting metastasis by reducing tumor cell motility or invasiveness. Therapeutic compositions of the invention may be effective in adult and pediatric oncology including in solid phase tumors/malignancies, locally advanced tumors, human soft tissue sarcomas, metastatic cancer, including lymphatic metastases, blood cell malignancies including multiple myeloma, acute and chronic leukemias, and lymphomas, head and neck cancers including mouth cancer, larynx cancer and thyroid cancer, lung cancers including small cell carcinoma and non-small cell cancers, breast cancers including small cell carcinoma and ductal carcinoma, gastrointestinal cancers including esophageal cancer, stomach cancer, colon cancer, colorectal cancer and polyps associated with colorectal neoplasia, pancreatic cancers, liver cancer, urologic cancers including bladder cancer and prostate cancer, malignancies of the female genital tract including ovarian carcinoma, uterine (including endometrial) cancers, and solid tumor in the ovarian follicle, kidney cancers including renal cell carcinoma, brain cancers including intrinsic brain tumors, neuroblastoma, astrocytic brain tumors, gliomas, metastatic tumor cell invasion in the central nervous system, bone cancers including osteomas, skin cancers including malignant melanoma, tumor progression of human skin keratinocytes, squamous cell carcinoma, basal cell carcinoma, hemangiopericytoma and Karposi's sarcoma.

[0233] Polypeptides, polynucleotides, or modulators of polypeptides of the invention (including inhibitors and stimulators of the biological activity of the polypeptide of the invention) may be administered to treat cancer. Therapeutic compositions can be administered in therapeutically effective dosages alone or in combination with adjuvant cancer therapy such as surgery, chemotherapy, radiotherapy, thermotherapy, and laser therapy, and may provide a beneficial effect, e.g. reducing tumor size, slowing rate of tumor growth, inhibiting metastasis, or otherwise improving overall clinical condition, without necessarily eradicating the cancer.

[0234] The composition can also be administered in therapeutically effective amounts as a portion of an anti-cancer cocktail. An anti-cancer cocktail is a mixture of the polypeptide or modulator of the invention with one or more anti-cancer drugs in addition to a pharmaceutically acceptable carrier for delivery. The use of anti-cancer cocktails as a cancer treatment is routine. Anti-cancer drugs that are well known in the art and can be used as a treatment in combination with the polypeptide or modulator of the invention include: Actinomycin D, Aminoglutethimide, Asparaginase, Bleomycin, Busulfan, Carboplatin, Carnustine, Chlorambucil, Cisplatin (cis-DDP), Cyclophosphamide, Cytarabine HCl (Cytosine arabinoside), Dacarbazine, Dactinomycin, Daunorubicin HCl Doxorubicin HCl, Estramustine phosphate sodium, Etoposide (V16-213), Floxuridine, 5-Fluorouracil (5-Fu), Flutamide, Hydroxyurea (hydroxycarbamide), Ifosfamide, Interferon Alpha-2a, Interferon Alpha-2b, Leuprolide acetate (LHRH-releasing factor analog), Lomustine, Mechlorethamine HCI (nitrogen mustard), Melphalan, Mercaptopurine, Mesna, Methotrexate (MTX), Mitomycin, Mitoxantrone HCl, Octreotide, Plicarnycin, Procarbazine HCl, Streptozocin, Tarnoxifen citrate, Thioguanine, Thiotepa, Vinblastine sulfate, Vincristine sulfate, Amsacrine, Azacitidine, Hexamethylmelamine, Interleukin-2, Mitoguazone, Pentostatin, Semustine, Teniposide, and Vindesine sulfate.

[0235] In addition, therapeutic compositions of the invention may be used for prophylactic treatment of cancer. There are hereditary conditions and/or environmental situations (e.g. exposure to carcinogens) known in the art that predispose an individual to developing cancers. Under these circumstances, it may be beneficial to treat these individuals with therapeutically effective doses of the polypeptide of the invention to reduce the risk of developing cancers.

[0236] In vitro models can be used to determine the effective doses of the polypeptide of the invention as a potential cancer treatment. These in vitro models include proliferation assays of cultured tumor cells, growth of cultured tunor cells in soft agar (see Freshney, (1987) Culture of Animal Cells: A Manual of Basic Technique, Wily-Liss, New York, N.Y. Ch 18 and Ch 21), tumor systems in nude mice as described in Giovanella et al., J. Natl. Can. Inst., 52: 921-30 (1974), mobility and invasive potential of tumor cells in Boyden Chamber assays as described in Pilkington et al., Anticancer Res., 17: 4107-9 (1997), and angiogenesis assays such as induction of vascularization of the chick chorioallantoic membrane or induction of vascular endothelial cell migration as described in Ribatta et al., Intl. J. Dev. Biol., 40: 1189-97 (1999) and Li et al., Clin. Exp. Metastasis, 17:423-9 (1999), respectively. Suitable tumor cells lines are available, e.g. from American Type Tissue Culture Collection catalogs.

[0237] 4.10.12 Receptor/Ligand Activity

[0238] A polypeptide of the present invention may also demonstrate activity as receptor, receptor ligand or inhibitor or agonist of receptor/ligand interactions. A polynucleotide of the invention can encode a polypeptide exhibiting such characteristics. Examples of such receptors and ligands include, without limitation, cytokine receptors and their ligands, receptor kinases and their ligands, receptor phosphatases and their ligands, receptors involved in cell-cell interactions and their ligands (including without limitation, cellular adhesion molecules (such as selectins, integrins and their ligands) and receptor/ligand pairs involved in antigen presentation, antigen recognition and development of cellular and humoral immune responses. Receptors and ligands are also useful for screening of potential peptide or small molecule inhibitors of the relevant receptor/ligand interaction. A protein of the present invention (including, without limitation, fragments of receptors and ligands) may themselves be useful as inhibitors of receptor/ligand interactions.

[0239] The activity of a polypeptide of the invention may, among other means, be measured by the following methods:

[0240] Suitable assays for receptor-ligand activity include without limitation those described in: Current Protocols in Immunology, Ed by J. E. Coligan, A. M. Kruisbeek, D. H. Margulies, E. M. Shevach, W. Strober, Pub. Greene Publishing Associates and Wiley- Interscience (Chapter 7.28, Measurement of Cellular Adhesion under static conditions 7.28.1 - 7.28.22), Takai et al., Proc. Natl. Acad. Sci. USA 84:6864-6868, 1987; Bierer et al., J. Exp. Med. 168:1145-1156, 1988; Rosenstein et al., J. Exp. Med. 169:149-160 1989; Stoltenborg et al., J. Immunol. Methods 175:59-68, 1994; Stitt et al., Cell 80:661-670, 1995.

[0241] By way of example, the polypeptides of the invention may be used as a receptor for a ligand(s) thereby transmitting the biological activity of that ligand(s). Ligands may be identified through binding assays, affinity chromatography, dihybrid screening assays, BlAcore assays, gel overlay assays, or other methods known in the art.

[0242] Studies characterizing drugs or proteins as agonist or antagonist or partial agonists or a partial antagonist require the use of other proteins as competing ligands. The polypeptides of the present invention or ligand(s) thereof may be labeled by being coupled to radioisotopes, colorimetric molecules or a toxin molecules by conventional methods. (“Guide to Protein Purification” Murray P. Deutscher (ed) Methods in Enzymology Vol. 182 (1990) Academic Press, Inc. San Diego). Examples of radioisotopes include, but are not limited to, tritiurn and carbon-14 . Examples of colorimetric molecules include, but are not limited to, fluorescent molecules such as fluorescamine, or rhodamine or other colorimetric molecules. Examples of toxins include, but are not limited, to ricin.

[0243] 4.10.13 Drug Screening

[0244] This invention is particularly used for screening chemical compounds by using the novel polypeptides or binding fragments thereof in any of a variety of drug screening techniques. The polypeptides or fragments employed in such a test may either be free in solution, affixed to a solid support, borne on a cell surface or located intracellularly. One method of drug screening utilizes eukaryotic or prokaryotic host cells which are stably transformed with recombinant nucleic acids expressing the polypeptide or a fragment thereof. Drugs are screened against such transformed cells in competitive binding assays. Such cells, either in viable or fixed form, can be used for standard binding assays. One may measure, for example, the formation of complexes between polypeptides of the invention or fragments and the agent being tested or examine the diminution in complex formation between the novel polypeptides and an appropriate cell line, which are well known in the art.

[0245] Sources for test compounds that may be screened for ability to bind to or modulate (i.e., increase or decrease) the activity of polypeptides of the invention include (1) inorganic and organic chemical libraries, (2) natural product libraries, and (3) combinatorial libraries comprised of either random or mimetic peptides, oligonucleotides or organic molecules.

[0246] Chemical libraries may be readily synthesized or purchased from a number of commercial sources, and may include structural analogs of known compounds or compounds that are identified as “hits” or “leads” via natural product screening.

[0247] The sources of natural product libraries are microorganisms (including bacteria and fungi), animals, plants or other vegetation, or marine organisms, and libraries of mixtures for screening may be created by: (1) fermentation and extraction of broths from soil, plant or marine microorganisms or (2) extraction of the organisms themselves. Natural product libraries include polyketides, non-ribosomal peptides, and (non-naturally occurring) variants thereof. For a review, see Science 282:63-68 (1998).

[0248] Combinatorial libraries are composed of large numbers of peptides, oligonucleotides or organic compounds and can be readily prepared by traditional automated synthesis methods, PCR, cloning or proprietary synthetic methods. Of particular interest are peptide and oligonucleotide combinatorial libraries. Still other libraries of interest include peptide, protein, peptidomimetic, multiparallel synthetic collection, recombinatorial, and polypeptide libraries. For a review of combinatorial chemistry and libraries created therefrom, see Myers, Curr. Opin. Biotechnol. 8:701-707 (1997). For reviews and examples of peptidomimetic libraries, see Al-Obeidi et al., Mol. Biotechnol, 9(3):205-23 (1998); Hruby et al., Curr Opin Chem Biol, 1(1):114-19 (1997); Dorneret al., Bioorg Med Chem, 4(5):709-15 (1996) (alkylated dipeptides).

[0249] Identification of modulators through use of the various libraries described herein permits modification of the candidate “hit” (or “lead”) to optimize the capacity of the “hit” to bind a polypeptide of the invention. The molecules identified in the binding assay are then tested for antagonist or agonist activity in in vivo tissue culture or animal models that are well known in the art. In brief, the molecules are titrated into a plurality of cell cultures or animals and then tested for either cell/animal death or prolonged survival of the animal/cells.

[0250] The binding molecules thus identified may be complexed with toxins, e.g., ricin or cholera, or with other compounds that are toxic to cells such as radioisotopes. The toxin-binding molecule complex is then targeted to a tumor or other cell by the specificity of the binding molecule for a polypeptide of the invention. Alteratively, the binding molecules may be complexed with imaging agents for targeting and imaging purposes.

[0251] 4.10.14 Assay for Receptor Activity

[0252] The invention also provides methods to detect specific binding of a polypeptide e.g. a ligand or a receptor. The art provides numerous assays particularly useful for identifying previously unknown binding partners for receptor polypeptides of the invention. For example, expression cloning using mammalian or bacterial cells, or dihybrid screening assays can be used to identify polynucleotides encoding binding partners. As another example, affinity chromatography with the appropriate immobilized polypeptide of the invention can be used to isolate polypeptides that recognize and bind polypeptides of the invention. There are a number of different libraries used for the identification of compounds, and in particular small molecules, that modulate (i e., increase or decrease) biological activity of a polypeptide of the invention. Ligands for receptor polypeptides of the invention can also be identified by adding exogenous ligands, or cocktails of ligands to two cells populations that are genetically identical except for the expression of the receptor of the invention: one cell population expresses the receptor of the invention whereas the other does not. The response of the two cell populations to the addition of ligands(s) are then compared. Alternatively, an expression library can be co-expressed with the polypeptide of the invention in cells and assayed for an autocrine response to identify potential ligand(s). As still another example, BlAcore assays, gel overlay assays, or other methods known in the art can be used to identify binding partner polypeptides, including, (1) organic and inorganic chemical libraries, (2) natural product libraries, and (3) combinatorial libraries comprised of random peptides, oligonucleotides or organic molecules.

[0253] The role of downstream intracellular signaling molecules in the signaling cascade of the polypeptide of the invention can be determined. For example, a chimeric protein in which the cytoplasmic domain of the polypeptide of the invention is fused to the extracellular portion of a protein, whose ligand has been identified, is produced in a host cell. The cell is then incubated with the ligand specific for the extracellular portion of the chimeric protein, thereby activating the chimeric receptor. Known downstream proteins involved in intracellular signaling can then be assayed for expected modifications i.e. phosphorylation. Other methods known to those in the art can also be used to identify signaling molecules involved in receptor activity.

[0254] 4.10.15 Anti-inflammatory Activity

[0255] Compositions of the present invention may also exhibit anti-inflammatory activity. The anti-inflammatory activity may be achieved by providing a stimulus to cells involved in the inflammatory response, by inhibiting or promoting.cell-cell interactions (such as, for example, cell adhesion), by inhibiting or promoting chemotaxis of cells involved in the inflammatory process, inhibiting or promoting cell extravasation, or by stimulating or suppressing production of other factors which more directly inhibit or promote an inflammatory response. Compositions with such activities can be used to treat inflammatory conditions including chronic or acute conditions), including without limitation intimation associated with infection (such as septic shock, sepsis or systemic inflammatory response syndrome (SIRS)), ischemia-reperfusion injury, endotoxin lethality, arthritis, complement-mediated hyperacute rejection, nephritis, cytokine or chemokine-induced lung injury, inflammatory bowel disease, Crohn's disease or resulting from over production of cytokines such as TNF or IL-1. Compositions of the invention may also be useful to treat anaphylaxis and hypersensitivity to an antigenic substance or material. Compositions of this invention may be utilized to prevent or treat conditions such as, but not limited to, sepsis, acute pancreatitis, endotoxin shock, cytokine induced shock, rheumatoid arthritis, chronic inflammatory arthritis, pancreatic cell damage from diabetes mellitus type 1, graft versus host disease, inflammatory bowel disease, inflamation associated with pulmonary disease, other autoimmune disease or inflammatory disease, an antiproliferative agent such as for acute or chronic mylegenous leukemia or in the prevention of premature labor secondary to intrauterine infections.

[0256] 4.10.16 Leukemias

[0257] Leukemias and related disorders may be treated or prevented by administration of a therapeutic that promotes or inhibits function of the polynucleotides and/or polypeptides of the invention. Such leukemias and related disorders include but are not limited to acute leukemia, acute lymphocytic leukemia, acute myelocytic leukemia, myeloblastic, promyelocytic, myelomonocytic, monocytic, erythroleukemia, chronic leukemia, chronic myelocytic (granulocytic) leukemia and chronic lymphocytic leukemia (for a review of such disorders, see Fishman et al., 1985, Medicine, 2d Ed., J.B. Lippincott Co., Philadelphia).

[0258] 4.10.17 Nervous System Disorders

[0259] Nervous system disorders, involving cell types which can be tested for efficacy of intervention with compounds that modulate the activity of the polynucleotides and/or polypeptides of the invention, and which can be treated upon thus observing an indication of therapeutic utility, include but are not limited to nervous system injuries, and diseases or disorders which result in either a disconnection of axons, a diminution or degeneration of neurons, or demyelination. Nervous system lesions which may be treated in a patient (including human and non-human mammalian patients) according to the invention include but are not limited to the following lesions of either the central (including spinal cord, brain) or peripheral nervous systems:

[0260] (i) traumatic lesions, including lesions caused by physical injury or associated with surgery, for example, lesions which sever a portion of the nervous system, or compression injuries;

[0261] (ii) ischemic lesions, in which a lack of oxygen in a portion of the nervous system results in neuronal injury or death, including cerebral infarction or ischemia, or spinal cord infarction or ischemia;

[0262] (iii) infectious lesions, in which a portion of the nervous system is destroyed or injured as a result of infection, for example, by an abscess or associated with infection by human immunodeficiency virus, herpes zoster, or herpes simplex virus or with Lyme disease, tuberculosis, syphilis;

[0263] (iv) degenerative lesions, in which a portion of the nervous system is destroyed or injured as a result of a degenerative process including but not limited to degeneration associated with Parkinson's disease, Alzheimer's disease, Huntington's chorea, or amyotrophic lateral sclerosis;

[0264] (v) lesions associated with nutritional diseases or disorders, in which a portion of the nervous system is destroyed or injured by a nutritional disorder or disorder of metabolism including but not limited to, vitamin B12 deficiency, folic acid deficiency, Wernicke disease, tobacco-alcohol amblyopia, Marchiafava-Bignami disease (primary degeneration of the corpus callosum), and alcoholic cerebellar degeneration;

[0265] (vi) neurological lesions associated with systemic diseases including but not limited to diabetes (diabetic neuropathy, Bell's palsy), systemic lupus erythematosus, carcinoma, or sarcoidosis;

[0266] (vii) lesions caused by toxic substances including alcohol, lead, or particular neurotoxins; and

[0267] (viii) demyelinated lesions in which a portion of the nervous system is destroyed or injured by a demyelinating disease including but not limited to multiple sclerosis, human iumunodeficiency virus-associated myelopathy, transverse myelopathy or various etiologies, progressive multifocal leukoencephalopathy, and central pontine myelinolysis.

[0268] Therapeutics which are useful according to the invention for treatment of a nervous system disorder may be selected by testing for biological activity in promoting the survival or differentiation of neurons. For example, and not by way of limitation, therapeutics which elicit any of the following effects may be useful according to the invention:

[0269] (i) increased survival time of neurons in culture;

[0270] (ii) increased sprouting of neurons in culture or in vivo;

[0271] (iii) increased production of a neuron-associated molecule in culture or in vivo, e.g., choline acetyltransferase or acetylcholinesterase with respect to motor neurons; or

[0272] (iv) decreased symptoms of neuron dysfunction in vivo.

[0273] Such effects may be measured by any method known in the art. In preferred, non-limiting embodiments, increased survival of neurons may be measured by the method set forth in Arakawa et al. (1990, J. Neurosci. 10:3507-3515); increased sprouting of neurons may be detected by methods set forth in Pestronk et al. (1980, Exp. Neurol. 70:65-82) or Brown et al. (1981, Ann. Rev. Neurosci. 4:17-42); increased production of neuron-associated molecules may be measured by bioassay, enzymatic assay, antibody binding, Northern blot assay, etc., depending on the molecule to be measured; and motor neuron dysfunction may be measured by assessing the physical manifestation of motor neuron disorder, e.g., weakness, motor neuron conduction velocity, or functional disability.

[0274] In specific embodiments, motor neuron disorders that may be treated according to the invention include but are not limited to disorders such as infarction, infection, exposure to toxin, trauma, surgical damage, degenerative disease or malignancy that may affect motor neurons as well as other components of the nervous system, as well as disorders that selectively affect neurons such as amyotrophic lateral sclerosis, and including but not limited to progressive spinal muscular atrophy, progressive bulbar palsy, primary lateral sclerosis, infantile and juvenile muscular atrophy, progressive bulbar paralysis of childhood (Fazio-Londe syndrome), poliomyelitis and the post polio syndrome, and Hereditary Motorsensory Neuropathy (Charcot-Marie-Tooth Disease).

[0275] 4.10.18 Other Activities

[0276] A polypeptide of the invention may also exhibit one or more of the following additional activities or effects: inhibiting the growth, infection or function of, or killing, infectious agents, including, without limitation, bacteria, viruses, fungi and other parasites; effecting (suppressing or enhancing) bodily characteristics, including, without limitation, height, weight, hair color, eye color, skin, fat to lean ratio or other tissue pigmentation, or organ or body part size or shape (such as, for example, breast augmentation or diminution, change in bone form or shape); effecting biorhythms or circadian cycles or rhythms; effecting the fertility of male or female subjects; effecting the metabolism, catabolism, anabolism, processing, utilization, storage or elimination of dietary fat, lipid, protein, carbohydrate, vitamins, minerals, co-factors or other nutritional factors or component(s); effecting behavioral characteristics, including, without limitation, appetite, libido, stress, cognition (including cognitive disorders), depression (including depressive disorders) and violent behaviors; providing analgesic effects or other pain reducing effects; promoting differentiation and growth of embryonic stem cells in lineages other than hematopoietic lineages; hormonal or endocrine activity; in the case of enzymes, correcting deficiencies of the enzyme and treating deficiency-related diseases; treatment of hyperproliferative disorders (such as, for example, psoriasis); immunoglobulin-like activity (such as, for example, the ability to bind antigens or complement); and the ability to act as an antigen in a vaccine composition to raise an immune response against such protein or another material or entity which is cross-reactive with such protein.

[0277] 4.10.19 Identification of Polymorphisms

[0278] The demonstration of polymorphisms makes possible the identification of such polymorphisms in human subjects and the pharmacogenetic use of this information for diagnosis and treatment. Such polymorphisms may be associated with, e.g., differential predisposition or susceptibility to various disease states (such as disorders involving inflammation or immune response) or a differential response to drug administration, and this genetic information can be used to tailor preventive or therapeutic treatment appropriately. For example, the existence of a polymorphism associated with a predisposition to inflammation or autoimmune disease makes possible the diagnosis of this condition in humans by identifying the presence of the polymorphism.

[0279] Polymorphisms can be identified in a variety of ways known in the art which all generally involve obtaining a sample from a patient, analyzing DNA from the sample, optionally involving isolation or amplification of the DNA, and identifying the presence of the polymorphism in the DNA. For example, PCR may be used to amplify an appropriate fragment of genomic DNA which may then be sequenced. Altematively, the DNA may be subjected to allele-specific oligonucleotide hybridization (in which appropriate oligonucleotides are hybridized to the DNA under conditions permitting detection of a single base mismatch) or to a single nucleotide extension assay (in which an oligonucleotide that hybridizes immediately adjacent to the position of the polymorphism is extended with one or more labeled nucleotides). In addition, traditional restriction fragment length polymorphism analysis (using restriction enzymes that provide differential digestion of the genomic DNA depending on the presence or absence of the polymorphism) may be performed. Arrays with nucleotide sequences of the present invention can be used to detect polymorphisms. The array can comprise modified nucleotide sequences of the present invention in order to detect the nucleotide sequences of the present invention. In the alternative, any one of the nucleotide sequences of the present invention can be placed on the array to detect changes from those sequences.

[0280] Alternatively a polymorphism resulting in a change in the amino acid sequence could also be detected by detecting a corresponding change in amino acid sequence of the protein, e.g., by an antibody specific to the variant sequence.

[0281] 4.10.20 Arthritis and Inflammation

[0282] The immunosuppressive effects of the compositions of the invention against rheumatoid arthritis is determined in an experimental animal model system. The experimental model system is adjuvant induced arthritis in rats, and the protocol is described by J. Holoshitz, et at., 1983, Science, 219:56, or by B. Waksman et al., 1963, Int. Arch. Allergy Appl. Immunol., 23:129. Induction of the disease can be caused by a single injection, generally intradermally, of a suspension of killed Mycobacterium tuberculosis in complete Freund's adjuvant (CFA). The route of injection can vary, but rats may be injected at the base of the tail with an adjuvant mixture. The polypeptide is administered in phosphate buffered solution (PBS) at a dose of about 1-5 mg/kg. The control consists of administering PBS only.

[0283] The procedure for testing the effects of the test compound would consist of intradermally injecting killed Mycobacterium tuberculosis in CFA followed by immediately administering the test compound and subsequent treatment every other day until day 24. At 14, 15, 18, 20, 22, and 24 days after injection of Mycobacterium CFA, an overall arthritis score may be obtained as described by J. Holoskitz above. An analysis of the data would reveal that the test compound would have a dramatic affect on the swelling of the joints as measured by a decrease of the arthritis score.

[0284] 4.11 Therapeutic Methods

[0285] The compositions (including polypeptide fragments, analogs, variants and antibodies or other binding partners or modulators including antisense polynucleotides) of the invention have numerous applications in a variety of therapeutic methods. Examples of therapeutic applications include, but are not limited to, those exemplified herein.

### 4.11.1 EXAMPLE

[0286] One embodiment of the invention is the administration of an effective amount of the polypeptides or other composition of the invention to individuals affected by a disease or disorder that can be modulated by regulating the peptides of the invention. While the mode of administration is not particularly important, parenteral administration is preferred. An exemplary mode of administration is to deliver an intravenous bolus. The dosage of the polypeptides or other composition of the invention will normally be determined by the prescribing physician. It is to be expected that the dosage will vary according to the age, weight, condition and response of the individual patient. Typically, the amount of polypeptide administered per dose will be in the range of about 0.01 μg/kg to 100 mg/kg of body weight, with the preferred dose being about 0.1 μg/kg to 10 mg/kg of patient body weight. For parenteral administration, polypeptides of the invention will be formulated in an injectable form combined with a pharmaceutically acceptable parenteral vehicle. Such vehicles are well known in the art and examples include water, saline, Ringer's solution, dextrose solution, and solutions consisting of small amounts of the human serum albumin. The vehicle may contain minor amounts of additives that maintain the isotonicity and stability of the polypeptide or other active ingredient. The preparation of such solutions is within the skill of the art.

[0287] 4.12 Pharmaceutical Formulations and Routes of Administration

[0288] A protein or other composition of the present invention (from whatever source derived, including without limitation from recombinant and non-recombinant sources and including antibodies and other binding partners of the polypeptides of the invention) may be administered to a patient in need, by itself, or in pharmaceutical compositions where it is mixed with suitable carriers or excipient(s) at doses to treat or ameliorate a variety of disorders. Such a composition may optionally contain (in addition to protein or other active ingredient and a carrier) diluents, fillers, salts, buffers, stabilizers, solubilizers, and other materials well known in the art. The term “pharmaceutically acceptable” means a non-toxic material that does not interfere with the effectiveness of the biological activity of the active ingredient(s). The characteristics of the carrier will depend on the route of administration. The pharmaceutical composition of the invention may also contain cytokines, lymphokines, or other hematopoietic factors such as M-CSF, GM-CSF, TNF, IL-1, IL-2, IL-3, IL4, IL-5, IL-6, IL-7, IL-8, IL-9, IL-10, IL-11, IL-12, IL-13, IL-14, IL-15, IFN, TNF0O, TNF1, TNF2, G-CSF, Meg-CSF, thrombopoietin, stem cell factor, and erythropoietin. In further compositions, proteins of the invention may be combined with other agents beneficial to the treatment of the disease or disorder in question. These agents include various growth factors such as epidermal growth factor (EGF), platelet-derived growth factor (PDGF), transforming growth factors (TGF-α and TGF-β), insulin-like growth factor (IGF), as well as cytokines described herein.

[0289] The pharmaceutical composition may further contain other agents which either enhance the activity of the protein or other active ingredient or complement its activity or use in treatment. Such additional factors and/or agents may be included in the pharmaceutical composition to produce a synergistic effect with protein or other active ingredient of the invention, or to minimize side effects. Conversely, protein or other active ingredient of the present invention may be included in formulations of the particular clotting factor, cytokine, lymphokine, other hematopoietic factor, thrombolytic or anti-thrombotic factor, or anti-inflammatory agent to minimize side effects of the clotting factor, cytokine, lymphokine, other hematopoietic factor, thrombolytic or anti-thrombotic factor, or anti-inflammatory agent (such as IL-1Ra, IL-1Hy1, IL-1Hy2, anti-TNF, corticosteroids, immunosuppressive agents). A protein of the present invention may be active in multimers (e.g., heterodimers or homodimers) or complexes with itself or other proteins. As a result, pharmaceutical compositions of the invention may comprise a protein of the invention in such multimeric or complexed form.

[0290] As an alternative to being included in a pharmaceutical composition of the invention including a first protein, a second protein or a therapeutic agent may be concurrently administered with the first protein (e.g., at the same time, or at differing times provided that therapeutic concentrations of the combination of agents is achieved at the treatment site). Techniques for formulation and administration of the compounds of the instant application may be found in “Remington's Pharmaceutical Sciences,” Mack Publishing Co., Easton, Pa., latest edition. A therapeutically effective dose further refers to that amount of the compound sufficient to result in amelioration of symptoms, e.g., treatment, healing, prevention or amelioration of the relevant medical condition, or an increase in rate of treatment, healing, prevention or amelioration of such conditions. When applied to an individual active ingredient, administered alone, a therapeutically effective dose refers to that ingredient alone. When applied to a combination, a therapeutically effective dose refers to combined amounts of the active ingredients that result in the therapeutic effect, whether administered in combination, serially or simultaneously.

[0291] In practicing the method of treatment or use of the present invention, a therapeutically effective amount of protein or other active ingredient of the present invention is administered to a mammal having a condition to be treated. Protein or other active ingredient of the present invention may be administered in accordance with the method of the invention either alone or in combination with other therapies such as treatments employing cytokines, lymphokines or other hematopoietic factors. When co-administered with one or more cytokines, lymphokines or other hematopoietic factors, protein or other active ingredient of the present invention may be administered either simultaneously with the cytokine(s), lymphokine(s), other hematopoietic factor(s), thrombolytic or anti-thrombotic factors, or sequentially. If administered sequentially, the attending physician will decide on the appropriate sequence of administering protein or other active ingredient of the present invention in combination with cytokine(s), lymphokine(s), other hematopoietic factor(s), thrombolytic or anti-thrombotic factors.

[0292] 4.12.1 Routes of Administration

[0293] Suitable routes of administration may, for example, include oral, rectal, transmucosal, or intestinal administration; parenteral delivery, including intramuscular, subcutaneous, intramedullary injections, as well as intrathecal, direct intraventricular, intravenous, intraperitoneal, intranasal, or intraocular injections. Administration of protein or other active ingredient of the present invention used in the pharmaceutical composition or to practice the method of the present invention can be carried out in a variety of conventional ways, such as oral ingestion, inhalation, topical application or cutaneous, subcutaneous, intraperitoneal, parenteral or intravenous injection. Intravenous administration to the patient is preferred.

[0294] Alternately, one may administer the compound in a local rather than systemic manner, for example, via injection of the compound directly into a arthritic joints or in fibrotic tissue, often in a depot or sustained release formulation. In order to prevent the scarring process frequently occurring as complication of glaucoma surgery, the compounds may be administered topically, for example, as eye drops. Furthermore, one may administer the drug in a targeted drug delivery system, for example, in a liposome coated with a specific antibody, targeting, for example, arthritic or fibrotic tissue. The liposomes will be targeted to and taken up selectively by the afflicted tissue.

[0295] The polypeptides of the invention are administered by any route that delivers an effective dosage to the desired site of action. The determination of a suitable route of administration and an effective dosage for a particular indication is within the level of skill in the art. Preferably for wound treatment, one administers the therapeutic compound directly to the site. Suitable dosage ranges for the polypeptides of the invention can be extrapolated from these dosages or from similar studies in appropriate animal models. Dosages can then be adjusted as necessary by the clinician to provide maximal therapeutic benefit.

[0296] 4.12.2 Compositions/Formulations

[0297] Pharmaceutical compositions for use in accordance with the present invention thus may be formulated in a conventional manner using one or more physiologically acceptable carriers comprising excipients and auxiliaries which facilitate processing of the active compounds into preparations which can be used pharmaceutically. These pharmaceutical compositions may be manufactured in a manner that is itself known, e.g., by means of conventional mixing, dissolving, granulating, dragee-making, levigating, emulsifying, encapsulating, entrapping or lyophilizing processes. Proper formulation is dependent upon the route of administration chosen. When a therapeutically effective amount of protein or other active ingredient of the present invention is administered orally, protein or other active ingredient of the present invention will be in the form of a tablet, capsule, powder, solution or elixir. When administered in tablet form, the pharmaceutical composition of the invention may additionally contain a solid carrier such as a gelatin or an adjuvant. The tablet, capsule, and powder contain from about 5 to 95% protein or other active ingredient of the present invention, and preferably from about 25 to 90% protein or other actiye ingredient of the present invention. When administered in liquid form, a liquid carrier such as water, petroleun, oils of animal or plant origin such as peanut oil, mineral oil, soybean oil, or sesame oil, or synthetic oils may be added. The liquid form of the pharmaceutical composition may further contain physiological saline solution, dextrose or other saccharide solution, or glycols such as ethylene glycol, propylene glycol or polyethylene glycol. When administered in liquid form, the pharmaceutical composition contains from about 0.5 to 90% by weight of protein or other active ingredient of the present invention, and preferably from about I to 50% protein or other active ingredient of the present invention.

[0298] When a therapeutically effective amount of protein or other active ingredient of the present invention is administered by intravenous, cutaneous or subcutaneous injection, protein or other active ingredient of the present invention will be in the form of a pyrogen-free, parenterally acceptable aqueous solution. The preparation of such parenterally acceptable protein or other active ingredient solutions, having due regard to pH, isotonicity, stability, and the like, is within the skill in the art. A preferred pharmaceutical composition for intravenous, cutaneous, or subcutaneous injection should contain, in addition to protein or other active ingredient of the present invention, an isotonic vehicle such as Sodium Chloride Injection, Ringer's Injection, Dextrose Injection, Dextrose and Sodium Chloride Injection, Lactated Ringer's Injection, or other vehicle as known in the art. The pharmaceutical composition of the present invention may also contain stabilizers, preservatives, buffers, antioxidants, or other additives known to those of skill in the art. For injection, the agents of the invention may be formulated in aqueous solutions, preferably in physiologically compatible buffers such as Hanks's solution, Ringer's solution, or physiological saline buffer. For transmucosal administration, penetrants appropriate to the barrier to be permeated are used in the formulation. Such penetrants are generally known in the art.

[0299] For oral administration, the compounds can be formulated readily by combining the active compounds with pharmaceutically acceptable carriers well known in the art. Such carriers enable the compounds of the invention to be formulated as tablets, pills, dragees, capsules, liquids, gels, syrups, slurries, suspensions and the like, for oral ingestion by a patient to be treated. Pharmaceutical preparations for oral use can be obtained from a solid excipient, optionally grinding a resulting mixture, and processing the mixture of granules, after adding suitable auxiliaries, if desired, to obtain tablets or dragee cores. Suitable excipients are, in particular, fillers such as sugars, including lactose, sucrose, mannitol, or sorbitol; cellulose preparations such as, for example, maize starch, wheat starch, rice starch, potato starch, gelatin, gum tragacanth, methyl cellulose, hydroxypropylmethyl-cellulose, sodium carboxymethylcellulose, and/or polyvinylpyrrolidone (PVP). If desired, disintegrating agents may be added, such as the cross-linked polyvinyl pyrrolidone, agar, or alginic acid or a salt thereof such as sodium alginate. Dragee cores are provided with suitable coatings. For this purpose, concentrated sugar solutions may be used, which may optionally contain gum arabic, talc, polyvinyl pyrrolidone, carbopol gel, polyethylene glycol, and/or titanium dioxide, lacquer solutions, and suitable organic solvents or solvent mixtures. Dyestuffs or pigments may be added to the tablets or dragee coatings for identification or to characterize different combinations of active compound doses.

[0300] Pharmaceutical preparations which can be used orally include push-fit capsules made of gelatin, as well as soft, sealed capsules made of gelatin and a plasticizer, such as glycerol or sorbitol. The push-fit capsules can contain the active ingredients in admixture with filler such as lactose, binders such as starches, and/or lubricants such as talc or magnesium stearate and, optionally, stabilizers. In soft capsules, the active compounds may be dissolved or suspended in suitable liquids, such as fatty oils, liquid paraffin, or liquid polyethylene glycols. In addition, stabilizers may be added. All formulations for oral administration should be in dosages suitable for such administration. For buccal administration, the compositions may take the form of tablets or lozenges formulated in conventional manner.

[0301] For administration by inhalation, the compounds for use according to the present invention are conveniently delivered in the form of an aerosol spray presentation from pressurized packs or a nebuliser, with the use of a suitable propellant, e.g., dichlorodifluoromethane, trichlorofluoromethane, dichlorotetrafluoroethane, carbon dioxide or other suitable gas. In the case of a pressurized aerosol the dosage unit may be determined by providing a valve to deliver a metered amount. Capsules and cartridges of, e.g., gelatin for use in an inhaler or insufflator may be formulated containing a powder mix of the compound and a suitable powder base such as lactose or starch. The compounds may be formulated for parenteral administration by injection, e.g., by bolus injection or continuous infusion. Formulations for injection may be presented in unit dosage form, e.g., in ampules or in multi-dose containers, with an added preservative. The compositions may take such forms as suspensions, solutions or emulsions in oily or aqueous vehicles, and may contain formulatory agents such as suspending, stabilizing and/or dispersing agents.

[0302] Pharmaceutical formulations for parenteral administration include aqueous solutions of the active compounds in water-soluble form. Additionally, suspensions of the active compounds may be prepared as appropriate oily injection suspensions. Suitable lipophilic solvents or vehicles include fatty oils such as sesame oil, or synthetic fatty acid esters, such as ethyl oleate or triglycerides, or liposomes. Aqueous injection suspensions may contain substances which increase the viscosity of the suspension, such as sodium carboxymethyl cellulose, sorbitol, or dextran. Optionally, the suspension may also contain suitable stabilizers or agents which increase the solubility of the compounds to allow for the preparation of highly concentrated solutions. Alternatively, the active ingredient may be in powder form for constitution with a suitable vehicle, e.g., sterile pyrogen-free water, before use.

[0303] The compounds may also be formulated in rectal compositions such as suppositories or retention enemas, e.g., containing conventional suppository bases such as cocoa butter or other glycerides. In addition to the formulations described previously, the compounds may also be formulated as a depot preparation. Such long acting formulations may be administered by implantation (for example subcutaneously or intramuscularly) or by intramuscular injection. Thus, for example, the compounds may be formulated with suitable polymeric or hydrophobic materials (for example as an emulsion in an acceptable oil) or ion exchange resins, or as sparingly soluble derivatives, for example, as a sparingly soluble salt.

[0304] A pharmaceutical carrier for the hydrophobic compounds of the invention is a co-solvent system comprising benzyl alcohol, a nonpolar surfactant, a water-miscible organic polymer, and an aqueous phase. The co-solvent system may be the VPD co-solvent system. VPD is a solution of 3% w/v benzyl alcohol, 8% w/v of the nonpolar surfactant polysorbate 80, and 65% w/v polyethylene glycol 300, made up to volume in absolute ethanol. The VPD co-solvent system (VPD:5W) consists of VPD diluted 1:1 with a 5% dextrose in water solution. This co-solvent system dissolves hydrophobic compounds well, and itself produces low toxicity upon systemic administration. Naturally, the proportions of a co-solvent system may be varied considerably without destroying its solubility and toxicity characteristics. Furthermore, the identity of the co-solvent components may be varied: for example, other low-toxicity nonpolar surfactants may be used instead of polysorbate 80; the fraction size of polyethylene glycol may be varied; other biocompatible polymers may replace polyethylene glycol, e.g. polyvinyl pyrrolidone; and other sugars or polysaccharides may substitute for dextrose. Alternatively, other delivery systems for hydrophobic pharmaceutical compounds may be employed. Liposomes and emulsions are well known examples of delivery vehicles or carriers for hydrophobic drugs. Certain organic solvents such as dimethylsulfoxide also may be employed, although usually at the cost of greater toxicity. Additionally, the compounds may be delivered using a sustained-release system, such as semipermeable matrices of solid hydrophobic polymers containing the therapeutic agent. Various types of sustained-release materials have been established and are well known by those skilled in the art. Sustained-release capsules may, depending on their chemical nature, release the compounds for a few weeks up to over 100 days. Depending on the chemical nature and the biological stability of the therapeutic reagent, additional strategies for protein or other active ingredient stabilization may be employed.

[0305] The pharmaceutical compositions also may comprise suitable solid or gel phase carriers or excipients. Examples of such carriers or excipients include but are not limited to calcium carbonate, calcium phosphate, various sugars, starches, cellulose derivatives, gelatin, and polymers such as polyethylene glycols. Many of the active ingredients of the invention may be provided as salts with pharmaceutically compatible counter ions. Such pharmaceutically acceptable base addition salts are those salts which retain the biological effectiveness and properties of the free acids and which are obtained by reaction with inorganic or organic bases such as sodium hydroxide, magnesium hydroxide, ammonia, trialkylamine, dialkylamine, monoalkylamine, dibasic amino acids, sodium acetate, potassium benzoate, triethanol amine and the like.

[0306] The pharmaceutical composition of the invention may be in the form of a complex of the protein(s) or other active ingredient(s) of present invention along with protein or peptide antigens. The protein and/or peptide antigen will deliver a stimulatory signal to both B and T lymphocytes. B lymphocytes will respond to antigen through their surface immunoglobulin receptor. T lymphocytes will respond to antigen through the T cell receptor (TCR) following presentation of the antigen by MHC proteins. MHC and structurally related proteins including those encoded by class I and class II MHC genes on host cells will serve to present the peptide antigen(s) to T lymphocytes. The antigen components could also be supplied as purified MHC-peptide complexes alone or with co-stimulatory molecules that can directly signal T cells. Alternatively antibodies able to bind surface immunoglobulin and other molecules on B cells as well as antibodies able to bind the TCR and other molecules on T cells can be combined with the pharmaceutical composition of the invention.

[0307] The pharmaceutical composition of the invention may be in the form of a liposome in which protein of the present invention is combined, in addition to other pharmaceutically acceptable carriers, with amphipathic agents such as lipids which exist in aggregated form as micelles, insoluble monolayers, liquid crystals, or lamellar layers in aqueous solution. Suitable lipids for liposomal formulation include, without limitation, monoglycerides, diglycerides, sulfatides, lysolecithins, phospholipids, saponin, bile acids, and the like. Preparation of such liposomal formulations is within the level of skill in the art, as disclosed, for example, in U.S. Pat. Nos. 4,235,871; 4,501,728; 4,837,028; and 4,737,323, all of which are incorporated herein by reference.

[0308] The amount of protein or other active ingredient of the present invention in the pharmaceutical composition of the present invention will depend upon the nature and severity of the condition being treated, and on the nature of prior treatments which the patient has undergone. Ultimately, the attending physician will decide the amount of protein or other active ingredient of the present invention with which to treat each individual patient. Initially, the attending physician will administer low doses of protein or other active ingredient of the present invention and observe the patient's response. Larger doses of protein or other active ingredient of the present invention may be administered until the optimal therapeutic effect is obtained for the patient, and at that point the dosage is not increased further. It is contemplated that the various pharmaceutical compositions used to practice the method of the present invention should contain about 0.01 μg to about 100 mg (preferably about 0.1 μg to about 10 mg, more preferably about 0.1 μg to about 1 mg) of protein or other active ingredient of the present invention per kg body weight. For compositions of the present invention which are useful for bone, cartilage, tendon or ligament regeneration, the therapeutic method includes administering the composition topically, systematically, or locally as an implant or device. When administered, the therapeutic composition for use in this invention is, of course, in a pyrogen-free, physiologically acceptable form. Further, the composition may desirably be encapsulated or injected in a viscous form for delivery to the site of bone, cartilage or tissue damage. Topical administration may be suitable for wound healing and tissue repair. Therapeutically useful agents other than a protein or other active ingredient of the invention which may also optionally be included in the composition as described above, may alternatively or additionally, be administered simultaneously or sequentially with the composition in the methods of the invention. Preferably for bone and/or cartilage formation, the composition would include a matrix capable of delivering the protein-containing or other active ingredient-containing composition to the site of bone and/or cartilage damage, providing a structure for the developing bone and cartilage and optimally capable of being resorbed into the body. Such matrices may be formed of materials presently in use for other implanted medical applications.

[0309] The choice of matrix material is based on biocompatibility, biodegradability, mechanical properties, cosmetic appearance and interface properties. The particular application of the compositions will define the appropriate formulation. Potential matrices for the compositions may be biodegradable and chemically defined calcium sulfate, tricalcium phosphate, hydroxyapatite, polylactic acid, polyglycolic acid and polyanhydrides. Other potential materials are biodegradable and biologically well-defined, such as bone or dermal collagen. Further matrices are comprised of pure proteins or extracellular matrix components. Other potential matrices are nonbiodegradable and chemically defined, such as sintered hydroxyapatite, bioglass, aluminates, or other ceramics. Matrices may be comprised of combinations of any of the above mentioned types of material, such as polylactic acid and hydroxyapatite or collagen and tricalcium phosphate. The bioceramics may be altered in composition, such as in calcium-aluminate-phosphate and processing to alter pore size, particle size, particle shape, and biodegradability. Presently preferred is a 50:50 (mole weight) copolymer of lactic acid and glycolic acid in the form of porous particles having diameters ranging from 150 to 800 microns. In some applications, it will be useful to utilize a sequestering agent, such as carboxymethyl cellulose or autologous blood clot, to prevent the protein compositions from disassociating from the matrix.

[0310] A preferred family of sequestering agents is cellulosic materials such as alkylcelluloses (including hydroxyalkylcelluloses), including methylcellulose, ethylcellulose, hydroxyethylcellulose, hydroxypropylcellulose, hydroxypropyl-methylcellulose, and carboxymethylcellulose, the most preferred being cationic salts of carboxymethylcellulose (CMC). Other preferred sequestering agents include hyaluronic acid, sodium alginate, poly(ethylene glycol), polyoxyethylene oxide, carboxyvinyl polymer and poly(vinyl alcohol). The amount of sequestering agent useful herein is 0.5-20 wt %, preferably 1-10 wt % based on total formulation weight, which represents the amount necessary to prevent desorption of the protein from the polymer matrix and to provide appropriate handling of the composition, yet not so much that the progenitor cells are prevented from infiltrating the matrix, thereby providing the protein the opportunity to assist the osteogenic activity of the progenitor cells. In further compositions, proteins or other active ingredients of the invention may be combined with other agents beneficial to the treatment of the bone and/or cartilage defect, wound, or tissue in question. These agents include various growth factors such as epidermal growth factor (EGF), platelet derived growth factor (PDGF), transforming growth factors (TGF-α and TGF-β), and insulin-like growth factor (IGF).

[0311] The therapeutic compositions are also presently valuable for veterinary applications. Particularly domestic animals and thoroughbred horses, in addition to humans, are desired patients for such treatment with proteins or other active ingredients of the present invention. The dosage regimen of a protein-containing pharmaceutical composition to be used in tissue regeneration will be determined by the attending physician considering various factors which modify the action of the proteins, e.g., amount of tissue weight desired to be formed, the site of damage, the condition of the damaged tissue, the size of a wound, type of damaged tissue (e.g., bone), the patient's age, sex, and diet, the severity of any infection, time of administration and other clinical factors. The dosage may vary with the type of matrix used in the reconstitution and with inclusion of other proteins in the pharmaceutical composition. For example, the addition of other known growth factors, such as IGF I (insulin like growth factor I), to the final composition, may also effect the dosage. Progress can be monitored by periodic assessment of tissue/bone growth and/or repair, for example, X-rays, histomorphometric determinations and tetracycline labeling.

[0312] Polynucleotides of the present invention can also be used for gene therapy. Such polynucleotides can be introduced either in vivo or ex vivo into cells for expression in a mammalian subject. Polynucleotides of the invention may also be administered by other known methods for introduction of nucleic acid into a cell or organism (including, without limitation, in the form of viral vectors or naked DNA). Cells may also be cultured ex vivo in the presence of proteins of the present invention in order to proliferate or to produce a desired effect on or activity in such cells. Treated cells can then be introduced in vivo for therapeutic purposes.

[0313] 4.12.3 Effective Dosage

[0314] Pharmaceutical compositions suitable for use in the present invention include compositions wherein the active ingredients are contained in an effective amount to achieve its intended purpose. More specifically, a therapeutically effective amount means an amount effective to prevent development of or to alleviate the existing symptoms of the subject being treated. Determination of the effective amount is well within the capability of those skilled in the art, especially in light of the detailed disclosure provided herein. For any compound used in the method of the invention, the therapeutically effective dose can be estimated initially from appropriate in vitro assays. For example, a dose can be formulated in animal models to achieve a circulating concentration range that can be used to more accurately determine useful doses in humans. For example, a dose can be formulated in animal models to achieve a circulating concentration range that includes the IC₅₀ as determined in cell culture (i.e., the concentration of the test compound which achieves a half-maximal inhibition of the protein's biological activity). Such information can be used to more accurately determine useful doses in humans.

[0315] A therapeutically effective dose refers to that amount of the compound that results in amelioration of symptoms or a prolongation of survival in a patient. Toxicity and therapeutic efficacy of such compounds can be determined by standard pharmaceutical procedures in cell cultures or experimental animals, e.g., for determining the LD₅₀ (the dose lethal to 50% of the population) and the ED₅₀ (the dose therapeutically effective in 50% of the population). The dose ratio between toxic and therapeutic effects is the therapeutic index and it can be expressed as the ratio between LD₅₀ and ED₅₀. Compounds which exhibit high therapeutic indices are preferred. The data obtained from these cell culture assays and animal studies can be used in formulating a range of dosage for use in human. The dosage of such compounds lies preferably within a range of circulating concentrations that include the ED₅₀ with little or no toxicity. The dosage may vary within this range depending upon the dosage form employed and the route of administration utilized. The exact formulation, route of administration and dosage can be chosen by the individual physician in view of the patient's condition. See, e.g., Fingl et al., 1975, in “The Pharmacological Basis of Therapeutics”, Ch. 1 p. 1. Dosage amount and interval may be adjusted individually to provide plasma levels of the active moiety which are sufficient to maintain the desired effects, or minimal effective concentration (MEC). The MEC will vary for each compound but can be estimated from in vitro data. Dosages necessary to achieve the MEC will depend on individual characteristics and route of administration. However, HPLC assays or bioassays can be used to determine plasma concentrations.

[0316] Dosage intervals can also be determined using MEC value. Compounds should be administered using a regimen which maintains plasma levels above the MEC for 10-90% of the time, preferably between 30-90% and most preferably between 50-90%. In cases of local administration or selective uptake, the effective local concentration of the drug may not be related to plasma concentration.

[0317] An exemplary dosage regimen for polypeptides or other compositions of the invention will be in the range of about 0.01 μg/kg to 100 mg/kg of body weight daily, with the preferred dose being about 0.1 μg/kg to 25 mg/kg of patient body weight daily, varying in adults and children. Dosing may be once daily, or equivalent doses may be delivered at longer or shorter intervals.

[0318] The amount of composition administered will, of course, be dependent on the subject being treated, on the subject's age and weight, the severity of the affliction, the manner of administration and the judgment of the prescribing physician.

[0319] 4.12.4 Packaging

[0320] The compositions may, if desired, be presented in a pack or dispenser device which may contain one or more unit dosage forms containing the active ingredient. The pack may, for example, comprise metal or plastic foil, such as a blister pack. The pack or dispenser device may be accompanied by instructions for administration. Compositions comprising a compound of the invention formulated in a compatible pharmaceutical carrier may also be prepared, placed in an appropriate container, and labeled for treatment of an indicated condition.

[0321] 4.13 Antibodies

[0322] Also included in the invention are antibodies to proteins, or fragments of proteins of the invention. The term “antibody” as used herein refers to immunoglobulin molecules and immunologically active portions of immunoglobulin (Ig) molecules, i.e., molecules that contain an antigen binding site that specifically binds (immunoreacts with) an antigen. Such antibodies include, but are not limited to, polyclonal, monoclonal, chimeric, single chain, F_{ab}, F_{ab′}, and F_{(ab′)2} fragments, and an Fab expression library. In general, an antibody molecule obtained from humans relates to any of the classes IgG, IgM, IgA, IgE and IgD, which differ from one another by the nature of the heavy chain present in the molecule. Certain classes have subclasses as well, such as IgG₁, IgG₂, and others. Furthermore, in humans, the light chain may be a kappa chain or a lambda chain. Reference herein to antibodies includes a reference to all such classes, subclasses and types of human antibody species.

[0323] An isolated related protein of the invention may be intended to serve as an antigen, or a portion or fragment thereof, and additionally can be used as an immunogen to generate antibodies that immunospecifically bind the antigen, using standard techniques for polyclonal and monoclonal antibody preparation. The full-length protein can be used or, altematively, the invention provides antigenic peptide fragments of the antigen for use as immunogens. An antigenic peptide fragment comprises at least 6 amino acid residues of the amino acid sequence of the full length protein, such as an amino acid sequence shown in SEQ ID NO: 237, and encompasses an epitope thereof such that an antibody raised against the peptide forms a specific immune complex with the full length protein or with any fragment that contains the epitope. Preferably, the antigenic peptide comprises at least 10 amino acid residues, or at least 15 amino acid residues, or at least 20 amino acid residues, or at least 30 amino acid residues. Preferred epitopes encompassed by the antigenic peptide are regions of the protein that are located on its surface; commonly these are hydrophilic regions.

[0324] In certain embodiments of the invention, at least one epitope encompassed by the antigenic peptide is a region of related protein that is located on the surface of the protein, e.g., a hydrophilic region. A hydrophobicity analysis of the human related protein sequence will indicate which regions of a related protein are particularly hydrophilic and, therefore, are likely to encode surface residues useful for targeting antibody production. As a means for targeting antibody production, hydropathy plots showing regions of hydrophilicity and hydrophobicity may be generated by any method well known in the art, including, for example, the Kyte Doolittle or the Hopp Woods methods, either with or without Fourier transformation. See, e.g., Hopp and Woods, 1981, Proc. Nat. Acad Sci. USA 78: 3824-3828; Kyte and Doolittle 1982, J. Mol. Biol. 157: 105-142, each of which is incorporated herein by reference in its entirety. Antibodies that are specific for one or more domains within an antigenic protein, or derivatives, fragments, analogs or homologs thereof, are also provided herein.

[0325] A protein of the invention, or a derivative, fragment, analog, homolog or ortholog thereof, may be utilized as an immunogen in the generation of antibodies that immunospecifically bind these protein components.

[0326] Various procedures known within the art may be used for the production of polyclonal or monoclonal antibodies directed against a protein of the invention, or against derivatives, fragments, analogs homologs or orthologs thereof (see, for example, Antibodies: A Laboratory Manual, Harlow E, and Lane D, 1988, Cold Spring Harbor Laboratory Press, Cold Spring Harbor, N.Y., incorporated herein by reference). Some of these antibodies are discussed below.

[0327] 5.13.1 Polyclonal Antibodies

[0328] For the production of polyclonal antibodies, various suitable host animals (e.g., rabbit, goat, mouse or other mammal) may be immunized by one or more injections with the native protein, a synthetic variant thereof, or a derivative of the foregoing. An appropriate immunogenic preparation can contain, for example, the naturally occurring immunogenic protein, a chemically synthesized polypeptide representing the immunogenic protein, or a recombinantly expressed immunogenic protein. Furthermore, the protein may be conjugated to a second protein known to be immunogenic in the mammal being immunized. Examples of such immunogenic proteins include but are not limited to keyhole limpet hemocyanin, serum albumin, bovine thyroglobulin, and soybean trypsin inhibitor. The preparation can further include an adjuvanL Various adjuvants used to increase the immunological response include, but are not limited to, Freund's (complete and incomplete), mineral gels (e.g., aluminum hydroxide), surface active substances (e.g., lysolecithin, pluronic polyols, polyanions, peptides, oil emulsions, dinitrophenol, etc.), adjuvants usable in humans such as Bacille Calmette-Guerin and Corynebacterium parvum, or similar immunostimulatory agents. Additional examples of adjuvants which can be employed include MPL-TDM adjuvant (monophosphoryl Lipid A, synthetic trehalose dicorynomycolate).

[0329] The polyclonal antibody molecules directed against the immunogenic protein can be isolated from the mammal (e.g., from the blood) and further purified by well known techniques, such as affinity chromatography using protein A or protein G, which provide primarily the IgG fraction of immune serum. Subsequently, or alternatively, the specific antigen which is the target of the immunoglobulin sought, or an epitope thereof, may be immobilized on a column to purify the immune specific antibody by immunoaffinity chromatography. Purification of immunoglobulins is discussed, for example, by D. Wilkinson (The Scientist, published by The Scientist, Inc., Philadelphia Pa., Vol. 14, No. 8 (Apr. 17, 2000), pp. 25-28).

[0330] 5.13.2 Monoclonal Antibodies

[0331] The term “monoclonal antibody” (MAb) or “monoclonal antibody composition”, as used herein, refers to a population of antibody molecules that contain only one molecular species of antibody molecule consisting of a unique light chain gene product and a unique heavy chain gene product. In particular, the complementarity determining regions (CDRs) of the monoclonal antibody are identical in all the molecules of the population. MAbs thus contain an antigen binding site capable of immunoreacting with a particular epitope of the antigen characterized by a unique binding affinity for it.

[0332] Monoclonal antibodies can be prepared using hybridoma methods, such as those described by Kohler and Milstein, Nature, 256:495 (1975). In a hybridoma method, a mouse, hamster, or other appropriate host animal, is typically immunized with an immunizing agent to elicit lymphocytes that produce or are capable of producing antibodies that will specifically bind to the immunizing agent. Alternatively, the lymphocytes can be immunized in vitro. The immunizing agent will typically include the protein antigen, a fragment thereof or a fusion protein thereof. Generally, either peripheral blood lymphocytes are used if cells of human origin are desired, or spleen cells or lymph node cells are used if non-human mammalian sources are desired. The lymphocytes are then fused with an immortalized cell line using a suitable fusing agent, such as polyethylene glycol, to form a hybridoma cell (Goding, Monoclonal Antibodies: Principles and Practice, Academic Press, (1986) pp. 59-103). Immortalized cell lines are usually transformed mammalian cells, particularly myeloma cells of rodent, bovine and human origin. Usually, rat or mouse myeloma cell lines are employed. The hybridoma cells can be cultured in a suitable culture medium that preferably contains one or more substances that inhibit the growth or survival of the unfused, immortalized cells. For example, if the parental cells lack the enzyme hypoxanthine guanine phosphoribosyl transferase (HGPRT or HPRT), the culture medium for the hybridomas typically will include hypoxanthine, aminopterin, and thymidine (“HAT medium”), which substances prevent the growth of HGPRT-deficient cells.

[0333] Preferred immortalized cell lines are those that fuse efficiently, support stable high level expression of antibody by the selected antibody-producing cells, and are sensitive to a medium such as HAT medium. More preferred immortalized cell lines are murine myeloma lines, which can be obtained, for instance, from the Salk Institute Cell Distribution Center, San Diego, Calif. and the American Type Culture Collection, Manassas, Va. Human myeloma and mouse-human heteromyeloma cell lines also have been described for the production of human monoclonal antibodies (Kozbor, J. Immunol. 133:3001 (1984); Brodeur et al., Monoclonal Antibody Production Techniques and Applications, Marcel Dekker, Inc., New York, (1987) pp. 51-63).

[0334] The culture medium in which the hybridoma cells are cultured can then be assayed for the presence of monoclonal antibodies directed against the antigen. Preferably, the binding specificity of monoclonal antibodies produced by the hybridoma cells is determined by immunoprecipitation or by an in vitro binding assay, such as radioimmunoassay (RIA) or enzyme-linked immunoabsorbent assay (ELISA). Such techniques and assays are known in the art. The binding affinity of the monoclonal antibody can, for example, be determined by the Scatchard analysis of Munson and Pollard, Anal. Biochem. 107:220 (1980). Preferably, antibodies having a high degree of specificity and a high binding affinity for the target antigen are isolated.

[0335] After the desired hybridoma cells are identified, the clones can be subcloned by limiting dilution procedures and grown by standard methods. Suitable culture media for this purpose include, for example, Dulbecco's Modified Eagle's Medium and RPMI-1640 medium. Alternatively, the hybridoma cells can be grown in vivo as ascites in a mammal. The monoclonal antibodies secreted by the subclones can be isolated or purified from the culture medium or ascites fluid by conventional immunoglobulin purification procedures such as, for example, protein A-Sepharose, hydroxylapatite chromatography, gel electrophoresis, dialysis, or affinity chromatography.

[0336] The monoclonal antibodies can also be made by recombinant DNA methods, such as those described in U.S. Pat. No. 4,816,567. DNA encoding the monoclonal antibodies of the invention can be readily isolated and sequenced using conventional procedures (e.g., by using oligonucleotide probes that are capable of binding specifically to genes encoding the heavy and light chains of murine antibodies). The hybridoma cells of the invention serve as a preferred source of such DNA. Once isolated, the DNA can be placed into expression vectors, which are then transfected into host cells such as simian COS cells, Chinese hamster ovary (CHO) cells, or myeloma cells that do not otherwise produce immunoglobulin protein, to obtain the synthesis of monoclonal antibodies in the recombinant host cells. The DNA also can be modified, for example, by substituting the coding sequence for human heavy and light chain constant domains in place of the homologous murine sequences (U.S. Pat. No. 4,816,567; Morrison, Nature 368, 812-13 (1994)) or by covalently joining to the imrnunoglobulin coding sequence all or part of the coding sequence for a non-immunoglobulin polypeptide. Such a non-immunoglobulin polypeptide can be substituted for the constant domains of an antibody of the invention, or can be substituted for the variable domains of one antigen-combining site of an antibody of the invention to create a chimeric bivalent antibody.

[0337] 5.13.2 Humanized Antibodies

[0338] The antibodies directed against the protein antigens of the invention can further comprise humanized antibodies or human antibodies. These antibodies are suitable for administration to humans without engendering an immune response by the human against the administered immunoglobulin. Humanized forms of antibodies are chimeric immunoglobulins, immunoglobulin chains or fragments thereof (such as Fv, Fab, Fab′, F(ab′)₂ or other antigen-binding subsequences of antibodies) that are principally comprised of the sequence of a human immunoglobulin, and contain minimal sequence derived from a non-human immunoglobulin. Humanization can be performed following the method of Winter and co-workers (Jones et al., Nature 321:522-525 (1986); Riechmann et al., Nature, 332:323-327 (1988); Verhoeyen et al., Science, 239:1534-1536 (1988)), by substituting rodent CDRs or CDR sequences for the corresponding sequences of a human antibody. (See also U.S. Pat. No. 5,225,539.) In some instances, Fv framework residues of the human immunoglobulin are replaced by corresponding non-human residues. Humanized antibodies can also comprise residues which are found neither in the recipient antibody nor in the imported CDR or framework sequences. In general, the humanized antibody will comprise substantially all of at least one, and typically two, variable domains, in which all or substantially all of the CDR regions correspond to those of a non-human immunoglobulin and all or substantially all of the framework regions are those of a human immunoglobulin consensus sequence. The humanized antibody optimally also will comprise at least a portion of an irnmunoglobulin constant region (Fc), typically that of a human immunoglobulin (Jones et al., 1986; Riechmann et al., 1988; and Presta, Curr. OD. Struct. Biol., 2:593-596 (1992)).

[0339] 5.13.3 Human Antibodies

[0340] Fully human antibodies relate to antibody molecules in which essentially the entire sequences of both the light chain and the heavy chain, including the CDRs, arise from human genes. Such antibodies are terned “human antibodies”, or “fully human antibodies” herein. Human monoclonal antibodies can be prepared by the trioma technique; the human B-cell hybridoma technique (see Kozbor, et al., 1983 Immunol Today 4: 72) and the EBV hybridoma technique to produce human monoclonal antibodies (see Cole, et al., 1985 In: MONOCLONAL ANTIBODIES AND CANCER THERAPY, Alan R. Liss, Inc., pp. 77-96). Human monoclonal antibodies may be utilized in the practice of the present invention and may be produced by using human hybridomas (see Cote, et al., 1983. Proc Natl Acad Sci USA 80: 2026-2030) or by transforming human B-cells with Epstein Barr Virus in vitro (see Cole, et al., 1985 In: MONOCLONAL ANTIBODIES AND CANCER THERAPY, Alan R. Liss, Inc., pp. 77-96).

[0341] In addition, human antibodies can also be produced using additional techniques, including phage display libraries (Hoogenboom and Winter, J. Mol. Biol., 227:381 (1991); Marks et al., J. Mol. Biol., 222:581 (1991)). Similarly, human antibodies can be made by introducing human immunoglobulin loci into transgenic animals, e.g., mice in which the endogenous immunoglobulin genes have been partially or completely inactivated. Upon challenge, human antibody production is observed, which closely resembles that seen in humans in all respects, including gene rearrangement, assembly, and antibody repertoire. This approach is described, for example, in U.S. Pat. Nos. 5,545,807; 5,545,806; 5,569,825; 5,625,126; 5,633,425; 5,661,016, and in Marks et al. (Bio/Technology 10 779-783 (1992)); Lonberg et al. (Nature 368 856-859 (1994)); Morrison (Nature 368, 812-13 (1994)); Fishwild et al,(Nature Biotechnology 14, 845-51 (1996)); Neuberger Nature Biotechnology 14, 826 (1996)); and Lonberg and Huszar (Intern. Rev. Immunol. 13 65-93 (1995)).

[0342] Human antibodies may additionally be produced using transgenic nonhuman animals which are modified so as to produce fully human antibodies rather than the animal's endogenous antibodies in response to challenge by an antigen. (See PCT publication WO94/02602). The endogenous genes encoding the heavy and light immunoglobulin chains in the nonhuman host have been incapacitated, and active loci encoding human heavy and light chain immunoglobulins are inserted into the host's genome. The human genes are incorporated, for example, using yeast artificial chromosomes containing the requisite human DNA segments. An animal which provides all the desired modifications is then obtained as progeny by crossbreeding intermediate transgenic animals containing fewer than the full complement of the modifications. The preferred embodiment of such a nonhuman animal is a mouse, and is termed the Xenomouse™ as disclosed in PCT publications WO 96/33735 and WO 96/34096. This animal produces B cells which secrete fully human immunoglobulins. The antibodies can be obtained directly from the animal after immunization with an immunogen of interest, as, for example, a preparation of a polyclonal antibody, or alternatively from immortalized B cells derived from the animal, such as hybridomas producing monoclonal antibodies. Additionally, the genes encoding the immunoglobulins with human variable regions can be recovered and expressed to obtain the antibodies directly, or can be further modified to obtain analogs of antibodies such as, for example, single chain Fv molecules.

[0343] An example of a method of producing a nonhuman host, exemplified as a mouse, lacking expression of an endogenous immunoglobulin heavy chain is disclosed in U.S. Pat. No. 5,939,598. It can be obtained by a method including deleting the J segment genes from at least one endogenous heavy chain locus in an embryonic stem cell to prevent rearrangement of the locus and to prevent formation of a transcript of a rearranged immunoglobulin heavy chain locus, the deletion being effected by a targeting vector containing a gene encoding a selectable marker; and producing from the embryonic stem cell a transgenic mouse whose somatic and germ cells contain the gene encoding the selectable marker.

[0344] A method for producing an antibody of interest, such as a human antibody, is disclosed in U.S. Pat. No. 5,916,771. It includes introducing an expression vector that contains a nucleotide sequence encoding a heavy chain into one mammalian host cell in culture, introducing an expression vector containing a nucleotide sequence encoding a light chain into another mammalian host cell, and fusing the two cells to form a hybrid cell. The hybrid cell expresses an antibody containing the heavy chain and the light chain.

[0345] In a further improvement on this procedure, a method for identifying a clinically relevant epitope on an immunogen, and a correlative method for selecting an antibody that binds immunospecifically to the relevant epitope with high affinity, are disclosed in PCT publication WO 99/53049.

[0346] 5.13.4 Fab Fragments and Single Chain Antibodies

[0347] According to the invention, techniques can be adapted for the production of single-chain antibodies specific to an antigenic protein of the invention (see e.g., U.S. Pat. No. 4,946,778). In addition, methods can be adapted for the construction of Fab expression libraries (see e.g., Huse, et al., 1989 Science 246: 1275-1281) to allow rapid and effective identification of monoclonal Fab fragments with the desired specificity for a protein or derivatives, fragments, analogs or homologs thereof. Antibody fragments that contain the idiotypes to a protein antigen may be produced by techniques known in the art including, but not limited to: (i) an F_{(ab′)2} fragment produced by pepsin digestion of an antibody molecule; (ii) an F_{ab} fragment generated by reducing the disulfide bridges of an F_{(ab′)2} fragment; (iii) an F_{ab} fragment generated by the treatment of the antibody molecule with papain and a reducing agent and (iv) F_{ab} fragments.

[0348] 5.13.5 Bispecific Antibodies

[0349] Bispecific antibodies are monoclonal, preferably human or humanized, antibodies that have binding specificities for at least two different antigens. In the present case, one of the binding specificities is for an antigenic protein of the invention. The second binding target is any other antigen, and advantageously is a cell-surface protein or receptor or receptor subunit.

[0350] Methods for making bispecific antibodies are known in the art. Traditionally, the recombinant production of bispecific antibodies is based on the co-expression of two immunoglobulin heavy-chain/light-chain pairs, where the two heavy chains have different specificities (Milstein and Cuello, Nature, 305:537-539 (1983)). Because of the random assortment of immunoglobulin heavy and light chains, these hybridomas (quadromas) produce a potential mixture of ten different antibody molecules, of which only one has the correct bispecific structure. The purification of the correct molecule is usually accomplished by affinity chromatography steps. Similar procedures are disclosed in WO 93/08829, published 13 May 1993, and in Traunecker et al., 1991 EMBO J., 10:3655-3659.

[0351] Antibody variable domains with the desired binding specificities (antibody-antigen combining sites) can be fused to immunoglobulin constant domain sequences. The fusion preferably is with an immunoglobulin heavy-chain constant domain, comprising at least part of the hinge, CH2, and CH3 regions. It is preferred to have the first heavy-chain constant region (CH1) containing the site necessary for light-chain binding present in at least one of the fusions. DNAs encoding the immunoglobulin heavy-chain fusions and, if desired, the immunoglobulin light chain, are inserted into separate expression vectors, and are co-transfected into a suitable host organism. For further details of generating bispecific antibodies see, for example, Suresh et al., Methods in Enzymoloby, 121:210 (1986).

[0352] According to another approach described in WO 96/27011, the interface between a pair of antibody molecules can be engineered to maximize the percentage of heterodimers which are recovered from recombinant cell culture. The preferred interface comprises at least a part of the CH3 region of an antibody constant domain. In this method, one or more small amino acid side chains from the interface of the first antibody molecule are replaced with larger side chains (e.g. tyrosine or tryptophan). Compensatory “cavities” of identical or similar size to the large side chain(s) are created on the interface of the second antibody molecule by replacing large amino acid side chains with smaller ones (e.g. alanine or threonine). This provides a mechanism for increasing the yield of the heterodimer over other unwanted end-products such as homodimers.

[0353] Bispecific antibodies can be prepared as full length antibodies or antibody fragments (e.g. F(ab′)₂ bispecific antibodies). Techniques for generating bispecific antibodies from antibody fragments have been described in the literature. For example, bispecific antibodies can be prepared using chemical linkage. Brennan et al., Science 229:81 (1985) describe a procedure wherein intact antibodies are proteolytically cleaved to generate F(ab′)₂ fragments. These fragments are reduced in the presence of the dithiol complexing agent sodium arsenite to stabilize vicinal dithiols and prevent intermolecular disulfide formation. The Fab′ fragments generated are then converted to thionitrobenzoate (TNB) derivatives. One of the Fab′-TNB derivatives is then reconverted to the Fab′-thiol by reduction with mercaptoethylamine and is mixed with an equimolar amount of the other Fab′-TNB derivative to form the bispecific antibody. The bispecific antibodies produced can be used as agents for the selective immobilization of enzymes.

[0354] Additionally, Fab′ fragments can be directly recovered from E. coli and chemically coupled to form bispecific antibodies. Shalaby et al., J. Exp. Med. 175:217-225 (1992) describe the production of a fully humanized bispecific antibody F(ab′)₂ molecule. Each Fab′ fragment was separately secreted from E. coli and subjected to directed chemical coupling in vitro to form the bispecific antibody. The bispecific antibody thus formed was able to bind to cells overexpressing the ErbB2 receptor and normal human T cells, as well as trigger the lytic activity of human cytotoxic lymphocytes against human breast tumor targets.

[0355] Various techniques for making and isolating bispecific antibody fragments directly from recombinant cell culture have also been described. For example, bispecific antibodies have been produced using leucine zippers. Kostelny et al., J. Immunol. 148(5):1547-1553 (1992). The leucine zipper peptides from the Fos and Jun proteins were linked to the Fab′ portions of two different antibodies by gene fusion. The antibody homodimers were reduced at the hinge region to form monomers and then re-oxidized to form the antibody heterodimers. This method can also be utilized for the production of antibody homodimers. The “diabody” technology described by Hollinger et al., Proc. Natl. Acad. Sci. USA 90:6444-6448 (1993) has provided an alternative mechanism for making bispecific antibody fragments. The fragments comprise a heavy-chain variable domain (V_{H}) connected to a light-chain variable domain (V_{L}) by a linker which is too short to allow pairing between the two domains on the same chain. Accordingly, the V_{H} and V_{L} domains of one fragment are forced to pair with the complementary V_{L} and V_{H} domains of another fragment, thereby forming two antigen-binding sites. Another strategy for making bispecific antibody fragments by the use of single-chain Fv (sFv) dimers has also been reported. See, Gruber et al., J. Immunol. 152:5368 (1994).

[0356] Antibodies with more than two valencies are contemplated. For example, trispecific antibodies can be prepared. Tutt et al., J. Immunol. 147:60 (1991). Exemplary bispecific antibodies can bind to two different epitopes, at least one of which originates in the protein antigen of the invention. Alternatively, an anti-antigenic arm of an immunoglobulin molecule can be combined with an arm which binds to a triggering molecule on a leukocyte such as a T-cell receptor molecule (e.g. CD2, CD3, CD28, or B7), or Fc receptors for IgG (FcyR), such as FcyRI (CD64), FcyRII (CD32) and FcyRIIl (CD16) so as to focus cellular defense mechanisms to the cell expressing the particular antigen. Bispecific antibodies can also be used to direct cytotoxic agents to cells which express a particular antigen. These antibodies possess an antigen-binding arm and an arm which binds a cytotoxic agent or a radionuclide chelator, such as EOTUBE, DPTA, DOTA, or TETA. Another bispecific antibody of interest binds the protein antigen described herein and further binds tissue factor (TF).

[0357] 5.13.6 Heteroconjugate Antibodies

[0358] Heteroconjugate antibodies are also within the scope of the present invention. Heteroconjugate antibodies are composed of two covalently joined antibodies. Such antibodies have, for example, been proposed to target immune system cells to unwanted cells (U.S. Pat. No.4,676,980), and for treatment of HIV infection (WO 91/00360; WO 92/200373; EP 03089). It is contemplated that the antibodies can be prepared in vitro using known methods in synthetic protein chemistry, including those involving crosslinking agents. For example, immunotoxins can be constructed using a disulfide exchange reaction or by forming a thioether bond. Examples of suitable reagents for this purpose include iminothiolate and methyl-4-mercaptobutyrimidate and those disclosed, for example, in U.S. Pat. No. 4,676,980.

[0359] 5.13.7 Effector Function Engineering

[0360] It can be desirable to modify the antibody of the invention with respect to effector function, so as to enhance, e.g., the effectiveness of the antibody in treating cancer. For example, cysteine residue(s) can be introduced into the Fc region, thereby allowing interchain disulfide bond formation in this region. The homodimeric antibody thus generated can have improved internalization capability and/or increased complement-mediated cell killing and antibody-dependent cellular cytotoxicity (ADCC). See Caron et al., J. Exp Med., 176: 1191-1195 (1992) and Shopes, J. Immunol., 148: 2918-2922 (1992). Homodimeric antibodies with enhanced anti-tumor activity can also be prepared using heterobifunctional cross-linkers as described in Wolff et al. Cancer Research, 53: 2560-2565 (1993). Alternatively, an antibody can be engineered that has dual Fc regions and can thereby have enhanced complement lysis and ADCC capabilities. See Stevenson et al., Anti-Cancer Drug Design, 3: 219-230 (1989).

[0361] 5.13.8 Immunoconjugates

[0362] The invention also pertains to immunoconjugates comprising an antibody conjugated to a cytotoxic agent such as a chemotherapeutic agent, toxin (e.g., an enzymatically active toxin of bacterial, ftmgal, plant, or animal origin, or fragments thereof), or a radioactive isotope (i.e., a radioconjugate).

[0363] Chemotherapeutic agents useful in the generation of such immunoconjugates have been described above. Enzyrnatically active toxins and fragments thereof that can be used include diphtheria A chain, nonbinding active fragments of diphtheria toxin, exotoxin A chain (from Pseudomonas aeruginosa), ricin A chain, abrin A chain, modeccin A chain, alpha-sarcin, Aleurites fordii proteins, dianthin proteins, Phytolaca americana proteins (PAPI, PAPII, and PAP-S), momordica charantia inhibitor, curcin, crotin, sapaonaria officinalis inhibitor, gelonin, mitogellin, restrictocin, phenomycin, enomycin, and the tricothecenes. A variety of radionuclides are available for the production of radioconjugated antibodies. Examples include ²¹²Bi, 131I, ¹³¹In, ⁹⁰Y, and ¹⁸⁶Re.

[0364] Conjugates of the antibody and cytotoxic agent are made using a variety of bifunctional protein-coupling agents such as N-succinimidyl-3-(2-pyridyldithiol) propionate (SPDP), iminothiolane (IT), bifunctional derivatives of imidoesters (such as dimethyl adipimidate HCL), active esters (such as disuccinimidyl suberate), aldehydes (such as glutareldehyde), bis-azido compounds (such as bis (p-azidobenzoyl) hexanediamine), bis-diazonium derivatives (such as bis-(p-diazoniumbenzoyl)-ethylenediarnine), diisocyanates (such as tolyene 2,6-diisocyanate), and bis-active fluorine compounds (such as 1,5-difluoro-2,4-dinitrobenzene). For example, a ricin immunotoxin can be prepared as described in Vitetta et al., Science, 238: 1098 (1987). Carbon-14-labeled 1-isothiocyanatobenzyl-3-methyldiethylene triaminepentaacetic acid (MX-DTPA) is an exemplary chelating agent for conjugation of radionucleotide to the antibody. See WO094/11026.

[0365] In another embodiment, the antibody can be conjugated to a “receptor” (such streptavidin) for utilization in tumor pretargeting wherein the antibody-receptor conjugate is administered to the patient, followed by removal of unbound conjugate from the circulation using a clearing agent and then administration of a “ligand” (e.g., avidin) that is in turn conjugated to a cytotoxic agent.

[0366] 4.14 Computer REadable Sequences

[0367] In one application of this embodiment, a nucleotide sequence of the present invention can be recorded on computer readable media. As used herein, “computer readable media” refers to any medium which can be read and accessed directly by a computer. Such media include, but are not limited to: magnetic storage media, such as floppy discs, hard disc storage medium, and magnetic tape; optical storage media such as CD-ROM; electrical storage media such as RAM and ROM; and hybrids of these categories such as magnetic/optical storage media. A skilled artisan can readily appreciate how any of the presently known computer readable mediums can be used to create a manufacture comprising computer readable medium having recorded thereon a nucleotide sequence of the present invention. As used herein, “recorded” refers to a process for storing information on computer readable medium. A skilled artisan can readily adopt any of the presently known methods for recording information on computer readable medium to generate manufactures comprising the nucleotide sequence information of the present invention.

[0368] A variety of data storage structures are available to a skilled artisan for creating a computer readable medium having recorded thereon a nucleotide sequence of the present invention. The choice of the data storage structure will generally be based on the means chosen to access the stored information. In addition, a variety of data processor programs and formats can be used to store the nucleotide sequence information of the present invention on computer readable medium. The sequence information can be represented in a word processing text file, formatted in commercially-available software such as WordPerfect and Microsoft Word, or represented in the form of an ASCII file, stored in a database application, such as DB2, Sybase, Oracle, or the like. A skilled artisan can readily adapt any number of data processor structuring formats (e.g. text file or database) in order to obtain computer readable medium having recorded thereon the nucleotide sequence information of the present invention.

[0369] By providing any of the nucleotide sequences SEQ ID NO:1-236 and 473-708 or a representative fragment thereof; or a nucleotide sequence at least 95% identical to any of the nucleotide sequences of SEQ ID NO:1-236 and 473-708 in computer readable form, a skilled artisan can routinely access the sequence information for a variety of purposes. Computer software is publicly available which allows a skilled artisan to access sequence information provided in a computer readable medium. The examples which follow demonstrate how software which implements the BLAST (Altschul et al., J. Mol. Biol. 215:403-410 (1990)) and BLAZE (Brutlag et al., Comp. Chem. 17:203-207 (1993)) search algorithms on a Sybase system is used to identify open reading frames (ORFs) within a nucleic acid sequence. Such ORFs may be protein encoding fragments and may be useful in producing commercially important proteins such as enzymes used in fermentation reactions and in the production of commercially useful metabolites.

[0370] As used herein, “a computer-based system” refers to the hardware means, software means, and data storage means used to analyze the nucleotide sequence information of the present invention. The minimum hardware means of the computer-based systems of the present invention comprises a central processing unit (CPU), input means, output means, and data storage means. A skilled artisan can readily appreciate that any one of the currently available computer-based systems are suitable for use in the present invention. As stated above, the computer-based systems of the present invention comprise a data storage means having stored therein a nucleotide sequence of the present invention and the necessary hardware means and software means for supporting and implementing a search means. As used herein, “data storage means” refers to memory which can store nucleotide sequence information of the present invention, or a memory access means which can access manufactures having recorded thereon the nucleotide sequence information of the present invention.

[0371] As used herein, “search means” refers to one or more programs which are implemented on the computer-based system to compare a target sequence or target structural motif with the sequence information stored within the data storage means. Search means are used to identify fragments or regions of a known sequence which match a particular target sequence or target motif. A variety of known algorithms are disclosed publicly and a variety of commercially available software for conducting search means are and can be used in the computer-based systems of the present invention. Examples of such software includes, but is not limited to, Smith-Waterman, MacPattem (EMBL), BLASTN and BLASTA (NPOLYPEPTIDEIA). A skilled artisan can readily recognize that any one of the available algorithms or implementing software packages for conducting homology searches can be adapted for use in the present computer-based systems. As used herein, a “target sequence” can be any nucleic acid or amino acid sequence of six or more nucleotides or two or more amino acids. A skilled artisan can readily recognize that the longer a target sequence is, the less likely a target sequence will be present as a random occurrence in the database. The most preferred sequence length of a target sequence is from about 10 to 300 amino acids, more preferably from about 30 to 100 nucleotide residues. However, it is well recognized that searches for commercially important fragments, such as sequence fragments involved in gene expression and protein processing, may be of shorter length.

[0372] As used herein, “a target structural motif,” or “target motif,” refers to any rationally selected sequence or combination of sequences in which the sequence(s) are chosen based on a three-dimensional configuration which is formed upon the folding of the target motif. There are a variety of target motifs known in the art. Protein target motifs include, but are not limited to, enzyme active sites and signal sequences. Nucleic acid target motifs include, but are not limited to, promoter sequences, hairpin structures and inducible expression elements (protein binding sequences).

[0373] 4.15 Triple Helix Formation

[0374] In addition, the fragments of the present invention, as broadly described, can be used to control gene expression through triple helix formation or antisense DNA or RNA, both of which methods are based on the binding of a polynucleotide sequence to DNA or RNA. Polynucleotides suitable for use in these methods are preferably 20 to 40 bases in length and are designed to be complementary to a region of the gene involved in transcription (triple helix—see Lee et al., Nucl. Acids Res. 6:3073 (1979); Cooney et al., Science 15241:456 (1988); and Dervan et al., Science 251:1360 (1991)) or to the mRNA itself(antisense—Olmno, J. Neurochem. 56:560 (1991); Oligodeoxynucleotides as Antisense Inhibitors of Gene Expression, CRC Press, Boca Raton, Fla. (1988)). Triple helix-formation optimally results in a shut-off of RNA transcription from DNA, while antisense RNA hybridization blocks translation of an mRNA molecule into polypeptide. Both techniques have been demonstrated to be effective in model systems. Information contained in the sequences of the present invention is necessary for the design of an antisense or triple helix oligonucleotide.

[0375] 4.16 Diagnostic Assays and Kits

[0376] The present invention further provides methods to identify the presence or expression of one of the ORFs of the present invention, or homolog thereof, in a test sample, using a nucleic acid probe or antibodies of the present invention, optionally conjugated or otherwise associated with a suitable label.

[0377] In general, methods for detecting a polynucleotide of the invention can comprise contacting a sample with a compound that binds to and forms a complex with the polynucleotide for a period sufficient to form the complex, and detecting the complex, so that if a complex is detected, a polynucleotide of the invention is detected in the sample. Such methods can also comprise contacting a sample under stringent hybridization conditions with nucleic acid primers that anneal to a polynucleotide of the invention under such conditions, and amplifying annealed polynucleotides, so that if a polynucleotide is amplified, a polynucleotide of the invention is detected in the sample.

[0378] In general, methods for detecting a polypeptide of the invention can comprise contacting a sample with a compound that binds to and forms a complex with the polypeptide for a period sufficient to form the complex, and detecting the complex, so that if a complex is detected, a polypeptide of the invention is detected in the sample.

[0379] In detail, such methods comprise incubating a test sample with one or more of the antibodies or one or more of the nucleic acid probes of the present invention and assaying for binding of the nucleic acid probes or antibodies to components within the test sample.

[0380] Conditions for incubating a nucleic acid probe or antibody with a test sample vary. Incubation conditions depend on the format employed in the assay, the detection methods employed, and the type and nature of the nucleic acid probe or antibody used in the assay. One skilled in the art will recognize that any one of the commonly available hybridization, amplification or immunological assay formats can readily be adapted to employ the nucleic acid probes or antibodies of the present invention. Examples of such assays can be found in Chard, T., An Introduction to Radioimmunoassay and Related Techniques, Elsevier Science Publishers, Amsterdam, The Netherlands (1986); Bullock, G. R. et al., Techniques in Immunocytochemistry, Academic Press, Orlando, Fla. Vol. 1 (1982), Vol. 2 (1983), Vol. 3 (1985); Tijssen, P., Practice and Theory of immunoassays: Laboratory Techniques in Biochemistry and Molecular Biology, Elsevier Science Publishers, Amsterdam, The Netherlands (1985). The test samples of the present invention include cells, protein or membrane extracts of cells, or biological fluids such as sputum, blood, serum, plasma, or urine. The test sample used in the above-described method will vary based on the assay format, nature of the detection method and the tissues, cells or extracts used as the sample to be assayed. Methods for preparing protein extracts or membrane extracts of cells are well known in the art and can be readily be adapted in order to obtain a sample which is compatible with the system utilized.

[0381] In another embodiment of the present invention, kits are provided which contain the necessary reagents to carry out the assays of the present invention. Specifically, the invention provides a compartment kit to receive, in close confinement, one or more containers which comprises: (a) a first container comprising one of the probes or antibodies of the present invention; and (b) one or more other containers comprising one or more of the following: wash reagents, reagents capable of detecting presence of a bound probe or antibody.

[0382] In detail, a compartment kit includes any kit in which reagents are contained in separate containers. Such containers include small glass containers, plastic containers or strips of plastic or paper. Such containers allows one to efficiently transfer reagents from one compartment to another compartment such that the samples and reagents are not cross-contaminated, and the agents or solutions of each container can be added in a quantitative fashion from one compartment to another. Such containers will include a container which will accept the test sample, a container which contains the antibodies used in the assay, containers which contain wash reagents (such as phosphate buffered saline, Tris-buffers, etc.), and containers which contain the reagents used to detect the bound antibody or probe. Types of detection reagents include labeled nucleic acid probes, labeled secondary antibodies, or in the alternative, if the primary antibody is labeled, the enzymatic, or antibody binding reagents which are capable of reacting with the labeled antibody. One skilled in the art will readily recognize that the disclosed probes and antibodies of the present invention can be readily incorporated into one of the established kit formats which are well known in the art.

[0383] 4.17 Medical Imaging

[0384] The novel polypeptides and binding partners of the invention are useful in medical imaging of sites expressing the molecules of the invention (e.g., where the polypeptide of the invention is involved in the immune response, for imaging sites of inflammation or infection). See, e.g., Kunkel et al., U.S. Pat. No. 5,413,778. Such methods involve chemical attachment of a labeling or imaging agent, administration of the labeled polypeptide to a subject in a pharmaceutically acceptable carrier, and imaging the labeled polypeptide in vivo at the target site.

[0385] 4.18 Screening Assays

[0386] Using the isolated proteins and polynucleotides of the invention, the present invention further provides methods of obtaining and identifying agents which bind to a polypeptide encoded by an ORF corresponding to any of the nucleotide sequences set forth in SEQ ID NO:1-236 and 473-708, or bind to a specific domain of the polypeptide encoded by the nucleic acid. In detail, said method comprises the steps of:

[0387] (a) contacting an agent with an isolated protein encoded by an ORF of the present invention, or nucleic acid of the invention; and

[0388] (b) determining whether the agent binds to said protein or said nucleic acid.

[0389] In general, therefore, such methods for identifying compounds that bind to a polynucleotide of the invention can comprise contacting a compound with a polynucleotide of the invention for a time sufficient to form a polynucleotide/compound complex, and detecting the complex, so that if a polynucleotide/compound complex is detected, a compound that binds to a polynucleotide of the invention is identified.

[0390] Likewise, in general, therefore, such methods for identifying compounds that bind to a polypeptide of the invention can comprise contacting a compound with a polypeptide of the invention for a time sufficient to form a polypeptide/compound complex, and detecting the complex, so that if a polypeptide/compound complex is detected, a compound that binds to a polynucleotide of the invention is identified.

[0391] Methods for identifying compounds that bind to a polypeptide of the invention can also comprise contacting a compound with a polypeptide of the invention in a cell for a time sufficient to form a polypeptide/compound complex, wherein the complex drives expression of a receptor gene sequence in the cell, and detecting the complex by detecting reporter gene sequence expression, so that if a polypeptide/compound complex is detected, a compound that binds a polypeptide of the invention is identified.

[0392] Compounds identified via such methods can include compounds which modulate the activity of a polypeptide of the invention (that is, increase or decrease its activity, relative to activity observed in the absence of the compound). Alternatively, compounds identified via such methods can include compounds which modulate the expression of a polynucleotide of the invention (that is, increase or decrease expression relative to expression levels observed in the absence of the compound). Compounds, such as compounds identified via the methods of the invention, can be tested using standard assays well known to those of skill in the art for their ability to modulate activity/expression.

[0393] The agents screened in the above assay can be, but are not limited to, peptides, carbohydrates, vitamin derivatives, or other pharmaceutical agents. The agents can be selected and screened at random or rationally selected or designed using protein modeling techniques.

[0394] For random screening, agents such as peptides, carbohydrates, pharmaceutical agents and the like are selected at random and are assayed for their ability to bind to the protein encoded by the ORF of the present invention. Alternatively, agents may be rationally selected or designed. As used herein, an agent is said to be “rationally selected or designed” when the agent is chosen based on the configuration of the particular protein. For example, one skilled in the art can readily adapt currently available procedures to generate peptides, pharmaceutical agents and the like, capable of binding to a specific peptide sequence, in order to generate rationally designed antipeptide peptides, for example see Hurby et al., “Application of Synthetic Peptides: Antisense Peptides,” In Synthetic Peptides, A User's Guide, W.H. Freeman, N.Y. (1992), pp. 289-307, and Kaspczak et al., Biochemistry 28:9230-8 (1989), or pharmaceutical agents, or the like.

[0395] In addition to the foregoing, one class of agents of the present invention, as broadly described, can be used to control gene expression through binding to one of the ORFs or EMFs of the present invention. As described above, such agents can be randomly screened or rationally designed/selected. Targeting the ORF or EMF allows a skilled artisan to design sequence specific or element specific agents, modulating the expression of either a single ORF or multiple ORFs which rely on the same EMF for expression control. One class of DNA binding agents are agents which contain base residues which hybridize or form a triple helix formation by binding to DNA or RNA. Such agents can be based on the classic phosphodiester, ribonucleic acid backbone, or can be a variety of sulfhydryl or polymeric derivatives which have base attachment capacity.

[0396] Agents suitable for use in these methods preferably contain 20 to 40 bases and are designed to be complementary to a region of the gene involved in transcription (triple helix—see Lee et al., Nucl. Acids Res. 6:3073 (1979); Cooney et al., Science 241:456 (1988); and Dervan et al., Science 251:1360 (1991)) or to the mRNA itself(antisense—Okano, J. Neurochem. 56:560 (1991); Oligodeoxynucleotides as Antisense Inhibitors of Gene Expression, CRC Press, Boca Raton, Fla. (1988)). Triple helix-formation optimally results in a shut-off of RNA transcription from DNA, while antisense RNA hybridization blocks translation of an mRNA molecule into polypeptide. Both techniques have been demonstrated to be effective in model systems. Information contained in the sequences of the present invention is necessary for the design of an antisense or triple helix oligonucleotide and other DNA binding agents.

[0397] Agents which bind to a protein encoded by one of the ORFs of the present invention can be used as a diagnostic agent. Agents which bind to a protein encoded by one of the ORFs of the present invention can be formulated using known techniques to generate a pharmaceutical composition.

[0398] 4.19 Use of Nucleic Acids as Probes

[0399] Another aspect of the subject invention is to provide for polypeptide-specific nucleic acid hybridization probes capable of hybridizing with naturally occurring nucleotide sequences. The hybridization probes of the subject invention may be derived from any of the nucleotide sequences SEQ ID NO:1-236 and 473-708. Because the corresponding gene is only expressed in a limited number of tissues, a hybridization probe derived from of any of the nucleotide sequences SEQ ID NO:1-236 and 473-708 can be used as an indicator of the presence of RNA of cell type of such a tissue in a sample.

[0400] Any suitable hybridization technique can be employed, such as, for example, in situ hybridization. PCR as described in U.S. Pat. Nos. 4,683,195 and 4,965,188 provides additional uses for oligonucleotides based upon the nucleotide sequences. Such probes used in PCR may be of recombinant origin, may be chemically synthesized, or a mixture of both. The probe will comprise a discrete nucleotide sequence for the detection of identical sequences or a degenerate pool of possible sequences for identification of closely related genomic sequences.

[0401] Other means for producing specific hybridization probes for nucleic acids include the cloning of nucleic acid sequences into vectors for the production of mRNA probes. Such vectors are known in the art and are commercially available and may be used to synthesize RNA probes in vitro by means of the addition of the appropriate RNA polyrnerase as T7 or SP6 RNA polymerase and the appropriate radioactively labeled nucleotides. The nucleotide sequences may be used to construct hybridization probes for mapping their respective genomic sequences. The nucleotide sequence provided herein may be mapped to a chromosome or specific regions of a chromosome using well known genetic and/or chromosomal mapping techniques. These techniques include in situ hybridization, linkage analysis against known chromosomal markers, hybridization screening with libraries or flow-sorted chromosomal preparations specific to known chromosomes, and the like. The technique of fluorescent in situ hybridization of chromosome spreads has been described, among other places, in Vemna et al (1988) Human Chromosomes: A Manual of Basic Techniques, Pergamon Press, New York N.Y.

[0402] Fluorescent in situ hybridization of chromosomal preparations and other physical chromosome mapping techniques may be correlated with additional genetic map data. Examples of genetic map data can be found in the 1994 Genome Issue of Science (265:1981 f). Correlation between the location of a nucleic acid on a physical chromosomal map and a specific disease (or predisposition to a specific disease) may help delimit the region of DNA associated with that genetic disease. The nucleotide sequences of the subject invention may be used to detect differences in gene sequences between normal, carrier or affected individuals.

[0403] 4.20 Preparation of Support Bound Oligonucleotides

[0404] Oligonucleotides, i.e., small nucleic acid segments, may be readily prepared by, for example, directly synthesizing the oligonucleotide by chemical means, as is commonly practiced using an automated oligonucleotide synthesizer.

[0405] Support bound oligonucleotides may be prepared by any of the methods known to those of skill in the art using any suitable support such as glass, polystyrene or Teflon. One strategy is to precisely spot oligonucleotides synthesized by standard synthesizers. Immunobilization can be achieved using passive adsorption (Inouye & Hondo, (1990) J. Clin. Microbiol. 28(6) 1469-72); using UV light (Nagataet at, 1985; Dahlen et al, 1987; Morrissey & Collins, (1989) Mol. Cell Probes 3(2) 189-207) or by covalent binding of base modified DNA (Keller et al, 1988; 1989); all references being specifically incorporated herein.

[0406] Another strategy that may be employed is the use of the strong biotin-streptavidin interaction as a linker. For example, Broude et al (1994) Proc. Natl. Acad. Sci. USA 91(8) 3072-6, describe the use of biotinylated probes, although these are duplex probes, that are immobilized on streptavidin-coated magnetic beads. Streptavidin-coated beads may be purchased from Dynal, Oslo. Of course, this same linking chemistry is applicable to coating any surface with streptavidin. Biotinylated probes may be purchased from various sources, such as, e.g., Operon Technologies (Alameda, Calif.).

[0407] Nunc Laboratories (Naperville, Ill.) is also selling suitable material that could be used. Nunc Laboratories have developed a method by which DNA can be covalently bound to the microwell surface termed CovalinkNH. CovaLinkNH is a polystyrene surface grafted with secondary amino groups (>NH) that serve as bridge-heads for further covalent coupling. CovaLink Modules may be purchased from Nunc Laboratories. DNA molecules may be bound to CovaLink exclusively at the 5′-end by a phosphoramidate bond, allowing immobilization of more than 1 pmol of DNA (Rasmussenet al., (1991) Anal. Biochem. 198(1) 13842).

[0408] The use of CovaLink NH strips for covalent binding of DNA molecules at the 5′-end has been described (Rasmussen et al., (1991). In this technology, a phosphorarnidate bond is employed (Chu et al., (1983) Nucleic Acids Res. 1 1(8) 6513-29). This is beneficial as immobilizationusing only a single covalent bond is preferred. The phosphoramidate bond joins the DNA to the CovaLink NH secondary amino groups that are positioned at the end of spacer arms covalently grafted onto the polystyrene surface through a 2 nm long spacer arm. To link an oligonucleotideto CovaLinkNH via an phosphoramidatebond, the oligonucleotideterninus must have a 5′-end phosphate group. It is, perhaps, even possible for biotin to be covalently bound to CovaLink and then streptavidin used to bind the probes.

[0409] More specifically, the linkage method includes dissolving DNA in water (7.5 ng/ul) and denaturing for 10 min. at 95° C. and cooling on ice for 10 min. Ice-cold 0.1 M 1-methylimidazole, pH 7.0 (1-MeIm₇), is then added to a final concentrationof 10 mM 1-MeIm₇. A ss DNA solution is then dispensed into CovaLink NH strips (75 ul/well) standing on ice.

[0410] Carbodiimide 0.2 M 1-ethyl-3-(3-dimethylarninopropyl)-carbodiimide (EDC), dissolved in 10 mM 1-MeIm₇, is made fresh and 25 ul added per well. The strips are incubated for 5 hours at 50° C. After incubation the strips are washed using, e.g., Nunc-Immuno Wash; first the wells are washed 3 times, then they are soaked with washing solution for 5 min., and finally they are washed 3 times (where in the washing solution is 0.4 N NaOH, 0.25% SDS heated to 50° C.).

[0411] It is contemplated that a further suitable method for use with the present invention is that described in PCT Patent Application WO 90/03382 (Southern & Maskos), incorporated herein by reference. This method of preparing an oligonucleotide bound to a support involves attaching a nucleoside 3′-reagent through the phosphate group by a covalent phosphodi ester link to aliphatic hydroxyl groups carried by the support The oligonucleotide is then synthesized on the supported nucleoside and protecting groups removed from the synthetic oligonucleotide chain under standard conditions that do not cleave the oligonucleotide from the support. Suitable reagents include nucleoside phosphoradite and nucleoside hydrogen phosphorate.

[0412] An on-chip strategy for the preparation of DNA probe for the preparation of DNA probe arrays may be employed. For example, addressable laser-activated photodeprotection may be employed in the chemical synthesis of oligonucleotides directly on a glass surface, as described by Fodoret al. (1991) Science 251(4995) 767-73, incorporated herein by reference. Probes may also be immobilized on nylon supports as described by Van Ness et al. (1991) Nucleic Acids Res. 19(12) 3345-50; or linked to Teflon using the method of Duncan & Cavalier (1988) Anal. Biochem. 169(1) 104-8; all references being specifically incorporatedherein.

[0413] To link an oligonucleotideto a nylon support, as describedby Van Ness etaL (1991), requires activation of the nylon surface via alkylation and selective activation of the 5′-amine of oligonucleotides with cyanuric chloride.

[0414] One particular way to prepare support bound oligonucleotides is to utilize the light-generated synthesis described by Pease et al., (1994) PNAS USA 91(11) 5022-6, incorporated herein by reference). These authors used current photolithographictechniques to generate arrays of immobilized oligonucleotideprobes (DNA chips). These methods, in which light is used to direct the synthesis of oligonucleotide probes in high-density, miniaturized arrays, utilize photolabile 5′-protected N-acyl-deoxynucleoside phosphoramidites, surface linker chemistry and versatile combinatorial synthesis strategies. A matrix of 256 spatially defined oligonucleotide probes may be generated in this manner.

[0415] 4.21 Preparation of Nucleic Acid Fragmentsq

[0416] The nucleic acids may be obtained from any appropriate source, such as cDNAs, genomic DNA, chromosomal DNA, microdissected chromosome bands, cosmid or YAC inserts, and RNA, including mRNA without any amplification steps. For example, Sambrook et al. (1989) describes three protocols for the isolation of high molecular weight DNA from mammalian cells (p. 9.14-9.23).

[0417] DNA fragments may be prepared as clones in M13, plasmid or lambda vectors and/or prepared directly from genomic DNA or cDNA by PCR or other amplification methods. Samples may be prepared or dispensed in multiwell plates. About 100-1000 ng of DNA samples may be prepared in 2-500 ml of final volume.

[0418] The nucleic acids would then be fragmented by any of the methods known to those of skill in the art including, for example, using restriction enzymes as described at 9.24-9.28 of Sambrook et al (1989), shearing by ultrasound and NaOH treatment.

[0419] Low pressure shearing is also appropriate, as described by Schriefer et al. (1990) Nucleic Acids Res. 18(24) 7455-6, incorporatedherein by reference). In this method, DNA samples are passed through a small French pressure cell at a variety of low to intermediate pressures. A lever device allows controlled application of low to intermediate pressures to the cell. The results of these studies indicate that low-pressure shearing is a useful alternative to sonic and enzymatic DNA fragmentationmethods.

[0420] One particularly suitable way for fragmenting DNA is contemplated to be that using the two base recognition endonuclease, CviJl, described by Fitzgerald et al. (1992) Nucleic Acids Res. 20(14) 3753-62. These authors described an approach for the rapid fragmentation and fractionation of DNA into particular sizes that they contemplated to be suitable for shotgun cloning and sequencing.

[0421] The restriction endonuclease CviJI normally cleaves the recognition sequence PuGCPy between the G and C to leave blunt ends. Atypical reaction conditions, which alter the specificity of this enzyme (CviJI**), yield a quasi-random distribution of DNA fragments form the small molecule pUC19 (2688 base pairs). Fitzgerald et al. (1992) quantitativelyevaluated the randomness of this fragmentation strategy, using a CviJI** digest of pUC19 that was size fractionated by a rapid gel filtration method and directly ligated, without end repair, to a lac Z minus M13 cloning vector. Sequence analysis of 76 clones showed that CviJI* * restricts pyGCPy and PuGCPu, in addition to PuGCPy sites, and that new sequence data is accumulated at a rate consistent with random fragmentation.

[0422] As reported in the literature, advantages of this approach compared to sonication and agarose gel fractionation include: smaller amounts of DNA are required (0.2-0.5 ug instead of 2-5 ug); and fewer steps are involved (no preligation, end repair, chemical extraction, or agarose gel electrophoresis and elution are needed

[0423] Irrespective of the manner in which the nucleic acid fragments are obtained or prepared, it is important to denature the DNA to give single stranded pieces available for hybridization. This is achieved by incubating the DNA solution for 2-5 minutes at 80-90° C. The solution is then cooled quickly to 2° C. to prevent renaturation of the DNA fragments before they are contacted with the chip. Phosphate groups must also be removed from genomic DNA by methods known in the art.

[0424] 4.22 Preparation of DNA Arrays

[0425] Arrays may be prepared by spotting DNA samples on a support such as a nylon membrane. Spotting may be performed by using arrays of metal pins (the positions of which correspond to an array of wells in a microtiter plate) to repeated by transfer of about 20 nl of a DNA solution to a nylon membrane. By offset printing, a density of dots higher than the density of the wells is achieved. One to 25 dots may be accommodated in 1 mm², depending on the type of label used. By avoiding spotting in some preselected number of rows and columns, separate subsets (subarrays) may be formed. Samples in one subarray may be the same genomic segment of DNA (or the same gene) from different individuals, or may be different, overlapped genomic clones. Each of the subarrays may represent replica spotting of the same samples. In one example, a selected gene segment may be amplified from 64 patients. For each patient, the amplified gene segment may be in one 96-well plate (all 96 wells containing the same sample). A plate for each of the 64 patients is prepared. By using a 96-pin device, all samples may be spotted on one 8×12 cm membrane. Subarrays may contain 64 samples, one from each patient. Where the 96 subarrays are identical, the dot span may be 1 mm² and there may be a I mm space between subarrays.

[0426] Another approach is to use membranes or plates (available from NUNC, Naperville, Ill.) which may be partitioned by physical spacers e.g. a plastic grid molded over the membrane, the grid being similar to the sort of membrane applied to the bottom of multiwell plates, or hydrophobic strips. A fixed physical spacer is not preferred for imaging by exposure to flat phosphor-storage screens or x-ray films.

[0427] The present invention is illustrated in the following examples. Upon consideration of the present disclosure, one of skill in the art will appreciate that many other embodiments and variations may be made in the scope of the present invention. Accordingly, it is intended that the broader aspects of the present invention not be limited to the disclosure of the following examples. The present invention is not to be limited in scope by the exemplified embodiments which are intended as illustrations of single aspects of the invention, and compositions and methods which are functionally equivalent are within the scope of the invention. Indeed, numerous modifications and variations in the practice of the invention are expected to occur to those skilled in the art upon consideration of the present preferred embodiments. Consequently, the only limitations which should be placed upon the scope of the invention are those which appear in the appended claims.

[0428] All references cited within the body of the instant specification are hereby incorporated by reference in their entirety.

### 5.0 EXAMPLES

### 5.1.1 Example 1

[0429] Novel Nucleic Acid Sequences Obtained From Various Libraries A plurality of novel nucleic acids were obtained from cDNA libraries prepared from various human tissues and in some cases isolated from a genomic library derived from human chromosome using standard PCR, SBH sequence signature analysis and Sanger sequencing techniques. The inserts of the library were amplified with PCR using primers specific for the vector sequences which flank the inserts. Clones from cDNA libraries were spotted on nylon membrane filters and screened with oligonucleotide probes (e.g., 7-mers) to obtain signature sequences. The clones were clustered into groups of similar or identical sequences. Representative clones were selected for sequencing.

[0430] In some cases, the 5′ sequence of the amplified inserts was then deduced using a typical Sanger sequencing protocol. PCR products were purified and subjected to fluorescent dye terminator cycle sequencing. Single pass gel sequencing was done using a 377 Applied Biosystems (ABI) sequencer to obtain the novel nucleic acid sequences. In some cases RACE (Random Amplification of cDNA Ends) was performed to further extend the sequence in the 5′ direction.

### 5.1.2 Example 2

[0431] Assemblage of Novel Nucleic Acids

[0432] The contigs or nucleic acids of the present invention, designated as SEQ ID NO: 473-708 were assembled using an EST sequence as a seed. Then a recursive algorithm was used to extend the seed EST into an extended assemblage, by pulling additional sequences from different databases (i.e., Hyseq's database containing EST sequences, dbEST version 114, gb pri 114, and UniGene version 101 ) that belong to this assemblage. The algorithm terminated when there was no additional sequences from the above databases that would extend the assemblage. Inclusion of component sequences into the assemblage was based on a BLASTN hit to the extending assemblage with BLAST score greater than 300 and percent identity greater than 95%.

[0433] A polypeptide was predicted to be encoded by each of SEQ ID NO:473-708 as set forth below. The polypeptides was predicted using a software program called FASTY (available from http://fastabioch.virginia.edu) which selects a polypeptides based on a comparison of translated novel polynucleotide to known polynucleotides (W. R Pearson, Methods in Enzymology, 183:63-98 (1990), herein incorporated by reference. The predicted polypeptides are shown in Table 7.

### 5.2.2 Example 3

[0434] Novel Nucleic Acids

[0435] Using PHRAP (Univ. of Washington) or CAP4 (Paracel), a full length gene cDNA sequence and its corresponding protein sequence were generated from the assemblage. Any frame shifts and incorrect stop codons were corrected by hand editing. During editing, the sequence was checked using FASTY and/or BLAST against Genbank (i.e. dbEST version 117, gb pri 117, UniGene version 117, Genpept release 117). Other computer programs which may have been used in the editing process were phredPhrap and Consed (University of Washington) and ed-ready, ed-ext and gc-zip-2 (Hyseq, Inc.). The full-length nucleotide, including splice variants resulting from these procedures are shown in the Sequence Listing as SEQ ID NOS: 1-217.

[0436] Table 1 shows the various tissue sources of SEQ ID NO: 1-217.

[0437] The nearest neighbor results for SEQ ID NO: 1-217 were obtained by a BLASTP version 2.0 al 19MP-WashU search against Genpept release 120 and Geneseq Oct. 12, 2000 release 21 (Derwent), using BLAST algorithm. The nearest neighbor result showed the closest homologue for SEQ ID NO: 1-217 from Genpept. The translated amino acid sequences for which the nucleic acid sequence encodes are shown in the Sequence Listing. The homologs with identifiable functions for SEQ ID NO: 1-217 are shown in Table 2 below.

[0438] Using eMatrix software package (Stanford University, Stanford, Calif.) (Wu et al., J. Comp. Biol., Vol. 6 pp. 219-235 (1999) herein incorporated by reference), all the sequences were examined to determine whether they had identifiable signature regions. Table 3 shows the signature region found in the indicated polypeptide sequences, the description of the signature, the eMatrix p-value(s) and the position(s) of the signature within the polypeptide sequence.

[0439] Using the pFam software program (Sonnhammer et al., Nucleic Acids Res., Vol. 26(1) pp. 320-322 (1998) herein incorporated by reference) all the polypeptide sequences were examined for domains with homology to certain peptide domains. Table 4 shows the name of the domain found, the description, the p-value and the pFam score for the identified domain within the sequence.

[0440] The nucleotide sequence within the sequences that codes for signal peptide sequences and their cleavage sites can be determine from using Neural Network SignalP V1.1 program (from Center for Biological Sequence Analysis, The Technical University of Denmark). The process for identifying prokaryotic and eukaryotic signal peptides and their cleavage sites are also disclosed by Henrik Nielson, Jacob Engelbrecht, Soren Brunak, and Gunnar von Heijne in the publication “Identification of prokaryotic and eukaryotic signal peptides and prediction of their cleavage sites” Protein Engineering, Vol. 10, no. 1, pp. 1-6 (1997), incorporated herein by reference. A maximum S score and a mean S score, as described in the Nielson et as reference, was obtained for the polypeptide sequences. Table 5 shows the position of the signal peptide in. each of the polypeptides and the maximum score and mean score associated with that signal peptide.

[0441] 5.3.2 Example 4

[0442] Novel Nucleic Acids

[0443] Using PHRAP (Univ. of Washington) or CAP4 (Paracel), a fuIll length gene cDNA sequence and its corresponding protein sequence were generated from the assemblage. Any frame shifts and incorrect stop codons were corrected by hand editing. During editing, the sequence was checked using FASTY and/or BLAST against Genbank (i.e., dbEST version 118, gb pri 118, UniGene version 118, Genpept release 118). Other computer programs which may have been used in the editing process were phredPhrap and Consed (University of Washington) and ed-ready, ed-ext and gc-zip-2 (Hyseq, Inc.). The full-length nucleotide, including splice variants resulting from these procedures are shown in the Sequence Listing as SEQ ID NOS: 218-236.

[0444] Table 1 shows the various tissue sources of SEQ ID NO: 218-236.

[0445] The homology results for SEQ ID NO: 218-236 were obtained by a BLASTP version 2.0 al 19MP-WashU search against Genpept release 120 and Geneseq Oct. 12, 2000 release 21 (Derwent), using BLAST algorithm. The nearest neighbor result showed the homologs for SEQ ID NO: 218-236 from Genpept. The translated amino acid sequences for which the nucleic acid sequence encodes are shown in the Sequence Listing. The homologues with identifiable functions for SEQ ID NO: 218-236 are shown in Table 2 below.

[0446] Using eMatrix software package (Stanford University, Stanford, CA) (Wu et al., J. Comp. Biol., Vol. 6 pp. 219-235 (1999) herein incorporated by reference), all the sequences were examined to determine whether they had identifiable signature regions. Table 3 shows the signature region found in the indicated polypeptide sequences, the description of the signature, the eMatrix p-value(s) and the position(s) of the signature within the polypeptide sequence.

[0447] Using the pFam software program (Sonnhammer et al., Nucleic Acids Res., Vol. 26(1) pp. 320-322 (1998) herein incorporated by reference) all the polypeptide sequences were examined for domains with homology to certain peptide domains. Table 4 shows the name of the domain found, the description, the p-value and the pFarn score for the identified domain within the sequence.

[0448] The nucleotide sequence within the sequences that codes for signal peptide sequences and their cleavage sites can be determine from using Neural Network SignalP V1.1 program (from Center for Biological Sequence Analysis, The Technical University of Denmark). The process for identifying prokaryotic and eukaryotic signal peptides and their cleavage sites are also disclosed by Henrik Nielson, Jacob Engelbrecht, Soren Brunak, and Gunnar von Heijne in the publication “Identification of prokaryotic and eukaryotic signal peptides and prediction of their cleavage sites” Protein Engineering, Vol. 10, no. 1, pp. 1-6 (1997), incorporated herein by reference. A maximum S score and a mean S score, as described in the Nielson et as reference, was obtained for the polypeptide sequences. Table 5 shows the position of the signal peptide in each of the polypeptides and the maximum score and mean score associated with that signal peptide.

[0449] Table 6 is a correlation table of all of the sequences and the SEQ ID NOS.

TABLE 1

| Tissue Origin | RNA Source | Library Name | SEQ ID NOS: |
|---|---|---|---|
| adult brain | GIBCO | AB3001 | 3 15 19 74 88 174 |
| | | | 212-213 229 |
| adult brain | GIBCO | ABD003 | 1-4 14 33 44 57 73-74 |
| | | | 78 88 108 145 148 |
| | | | 174 196 209-213 215 |
| | | | 218 235 |
| adult brain | Clontech | ABR001 | 8 118 145 155 174 |
| | | | 192 208 |
| adult brain | Clontech | ABR006 | 2 25 35-36 214 220 |
| adult brain | Clontech | ABR008 | 1 4 13-14 16 25 33 |
| | | | 35-36 41-43 45 50 56 |
| | | | 65 80 86 88 95 108 |
| | | | 110-112 118 129 141 |
| | | | 145 158-159 162 164 |
| | | | 169-171 173-174 189 |
| | | | 196 208-211 215 218-220 |
| | | | 222-223 228 |
| adult brain | Clontech | ABR011 | 211 |
| adult brain | Invitrogen | ABR013 | 48 109 121 158-159 |
| | | | 199 |
| adult brain | Invitrogen | ABT004 | 3-4 14 35-36 88 145 |
| | | | 174 196 210-211 222 |
| | | | 224 228 |
| cultured preadipocytes | Strategene | ADP001 | 2 6-8 13 69 73 193 |
| | | | 210 212-213 225 229 |
| adrenal gland | Clontech | ADR002 | 3-4 7-8 12-14 21 33 |
| | | | 38 48 54 74 81 86-87 |
| | | | 145 158-159 163 208 |
| | | | 211-213 221 229 235 |
| adult heart | GIBCO | AHR001 | 1-2 9 11 14-15 33 37 |
| | | | 39-41 61-62 73-75 |
| | | | 102 145-146 148 187 |
| | | | 196 210-213 218 222 |
| | | | 224-225 235 |
| adult kidney | GIBCO | AKD001 | 1-4 8 10 12 14-15 33-34 |
| | | | 37 39-40 43-48 54 |
| | | | 59 73-74 79-80 88 |
| | | | 107-108 118 121 138 |
| | | | 145 159 163 169-171 |
| | | | 173-174 186 196 209-215 |
| | | | 224 229 235 |
| adult kidney | Invitrogen | AKT002 | 1 8 12 14 35-36 47-48 |
| | | | 86 118 130 148 158-159 |
| | | | 196 210 222-223 |
| | | | 225 235 |
| adult lung | GIBCO | ALG001 | 12 16 37 56 73 88 96-99 |
| | | | 106 114 145 148 |
| | | | 155 164 216-217 228-229 |
| lymph node | Clontech | ALN001 | 12 41 47-48 94 96-99 |
| | | | 107-109 121 145 158-159 |
| | | | 172 191 |
| young liver | GIBCO | ALV001 | 3 8 14 39-40 48 58 64 |
| | | | 66 86 104 108 140 |
| | | | 145 158-160 169-171 |
| | | | 174 189 211-214 216-217 |
| | | | 229 235 |
| adult liver | Invitrogen | ALV002 | 4 16 37 39-40 66 73 |
| | | | 86 105 145 169-171 |
| | | | 173 189 192 194-196 |
| | | | 209 211 214 222 224 |
| | | | 228 |
| adult liver | Clontech | ALV003 | 214 |
| adult ovary | Invitrogen | AOV001 | 1 3-4 7 11-16 18 20 |
| | | | 34-37 39-40 42-45 48 |
| | | | 57-59 70-74 76 78 80 |
| | | | 88 96-99 102 108 118 |
| | | | 140-141 145-148 155 |
| | | | 157-160 162-164 |
| | | | 172-175 182 187 196 |
| | | | 209-213 220-222 225 |
| | | | 228-229 235 |
| adult placenta | Invitrogen | APL001 | 14 45 222 |
| placenta | Invitrogen | APL002 | 55 138 |
| adult spleen | GIBCO | ASP001 | 2-4 8 11-12 33 39-40 |
| | | | 44 47-48 74 80 96-99 |
| | | | 107-110 121 145 155 |
| | | | 158-159 164 172 174 |
| | | | 191 211-213 216-217 |
| | | | 222 229 235 |
| testis | GIBCO | ATS001 | 2 35-37 39-40 175 |
| | | | 196 212-213 235 |
| adult bladder | Invitrogen | BLD001 | 5 7-8 14 73 138 141 |
| | | | 159 196 235 |
| bone marrow | Clontech | BMD001 | 2 4 7 12 19 39-40 47-48 |
| | | | 57 63 74 80 94 96-99 |
| | | | 103 107-108 118 |
| | | | 121 140 145 149 156 |
| | | | 158-160 169-172 186 |
| | | | 191 210 212-213 215 |
| | | | 229 |
| bone marrow | Clontech | BMD002 | 1 4 12 14 33 35-36 41 |
| | | | 44-45 47-48 74 88 |
| | | | 96-99 107-108 110 |
| | | | 118 158-160 173 190-191 |
| | | | 209 212-213 223 |
| bone marrow | Clontech | BMD004 | 7 48 96-99 158-159 |
| | | | 212-213 |
| adult colon | Invitrogen | CLN001 | 2 11-12 80 96-99 140 |
| | | | 191 |
| adult cervix | BioChain | CVX001 | 1-2 12 14-15 26 33 |
| | | | 35-36 39 42-43 47 54 |
| | | | 73 80 88 95 107 129-137 |
| | | | 150 196 212-213 |
| | | | 220-221 224 227-229 |
| | | | 235 |
| endothelial cells | Strategene | EDT001 | 2 4 8 14 33-36 39-40 |
| | | | 42-43 56 67-69 73-74 |
| | | | 80 88 95 108-109 116 |
| | | | 121 132 140 145 163 |
| | | | 173 209 211-213 223 |
| | | | 225 228-229 |
| Genomic clones from | Genomic DNA from | EPM001 | 206-207 |
| the short arm of | Genetic Research | | |
| chromosome 8 | | | |
| Genomic clones from | Genomic DNA from | EPM003 | 207 |
| the short arm of | Genetic Research | | |
| chromosome 8 | | | |
| Genomic clones from | Genomic DNA from | EPM004 | 207 |
| the short arm of | Genetic Research | | |
| chromosome 8 | | | |
| fetal brain | Clontech | FBR006 | 2 4 8 25 41 74 111-112 |
| | | | 141 143 162 187 |
| | | | 196 210-213 215-217 |
| | | | 219-220 222-223 228 |
| fetal brain | Invitrogen | FBT002 | 4 14 16 18 35-36 65 |
| | | | 74 78 80 111-112 139 |
| | | | 157 173-174 196 209-211 |
| | | | 220-221 |
| fetal kidney | Clontech | FKD001 | 7 33 46 65 108 211-213 |
| fetal kidney | Clontech | FKD002 | 80 212-213 |
| fetal lung | Clontech | FLG001 | 108 118 155 |
| fetal lung | Invitrogen | FLG003 | 3 39-40 145 211 222 |
| fetal liver-spleen | Columbia University | FLS001 | 1-4 7-8 10 14-17 22 |
| | | | 28 33-40 42-44 48 |
| | | | 52-53 60 66 68 74 88 |
| | | | 96-99 102 108 110-112 |
| | | | 117 136 138 140 |
| | | | 143 145 148 154 158-159 |
| | | | 163 169-172 174 |
| | | | 181 191 196 201 209-217 |
| | | | 220 222-224 228-229 |
| | | | 231 235 |
| fetal liver-spleen | Columbia University | FLS002 | 1-2 7-8 11 14-15 27-28 |
| | | | 33-37 39-40 44 53 |
| | | | 60 68 73-75 80 86 91 |
| | | | 95 108 110 115 122-128 |
| | | | 138 140 143 145 |
| | | | 154-155 164 169-172 |
| | | | 175 182-186 190 196 |
| | | | 200-205 209 212-214 |
| | | | 216-217 220 222-225 |
| | | | 230-231 235 |
| fetal liver-spleen | Columbia University | FLS003 | 214 223-224 |
| fetal liver | Invitrogen | FLV001 | 3 8 41 66 73-74 80 88 |
| | | | 95 108 110 145 148 |
| | | | 154 169-171 173 196 |
| | | | 211 214 |
| fetal liver | Clontech | FLV004 | 7 |
| fetal muscle | Invitrogen | FMS001 | 7 11 14 37 43 79 139 |
| | | | 196 211 224-225 228 |
| fetal muscle | Invitrogen | FMS002 | 7 |
| fetal skin | Invitrogen | FSK001 | 7-8 14 33 35-37 39 74 |
| | | | 88 108 142 162 172-175 |
| | | | 196 210-213 215 |
| | | | 220 222 |
| fetal skin | Invitrogen | FSK002 | 7 196 235 |
| fetal spleen | BioChain | FSP001 | 8 96-99 |
| umbilical cord | BioChain | FUC001 | 7 13-14 20 37 56 102 |
| | | | 108 113 145 148 160 |
| | | | 176-180 199 209 212-213 |
| | | | 222 |
| fetal brain | GIBCO | HFB001 | 2 13-15 37 42-43 57 |
| | | | 73 88 108 111-112 |
| | | | 118 129 163 174 192 |
| | | | 196 199 208-213 215 |
| | | | 224-225 229 235 |
| macrophage | Invitrogen | HMP001 | 44 |
| infant brain | Columbia University | IB2002 | 1 8 14 16 31 37 57 64 |
| | | | 77 80 88 108 111-112 |
| | | | 151 162 174 192 196 |
| | | | 210-213 215 223 225 |
| | | | 229 |
| infant brain | Columbia University | IB2003 | 7 31 57 88 94 148 |
| | | | 162 174 196-198 210-213 |
| | | | 215 224-225 |
| infant brain | Columbia University | IBM002 | 8 |
| infant brain | Columbia University | IBS001 | 31 42-43 111-112 196 |
| | | | 211 |
| Lung, fibroblast | Strategene | LFB001 | 4 73 174 196 199 222 |
| lung tumor | Invitrogen | LGT002 | 2-3 5 7-9 11-12 14 22 |
| | | | 24 37 39-40 42-44 |
| | | | 47-48 57 73 86 102 |
| | | | 106 109-110 121 140 |
| | | | 145 148 155 158-160 |
| | | | 162 164-166 169-171 |
| | | | 186 196 209-213 216-218 |
| | | | 220 222-223 228 |
| lymphocytes | ATCC | LPC001 | 13 30 39-40 42-44 |
| | | | 119 153 158-159 186-188 |
| | | | 209 211 222 226 |
| | | | 232-234 236 |
| leukocyte | GIBCO | LUC001 | 4-5 11 13 16 29-30 32 |
| | | | 34 39-41 44 47-51 57 |
| | | | 74 80 88 96-99 107-110 |
| | | | 116 121 129 145 |
| | | | 148 152-155 158-160 |
| | | | 163-164 172 186 190-191 |
| | | | 196 210-213 216-217 |
| | | | 219 229 235 |
| leukocyte | Clontech | LUC003 | 109 121 145 155 160 |
| | | | 212-213 235 |
| melanoma from cell | Clontech | MEL004 | 2 4 22 33 140 192 |
| line ATCC #CRL | | | 199 211-213 222 228 |
| 1424 | | | |
| mammary gland | Invitrogen | MMG001 | 1-2 4 7-8 12 14 22 |
| | | | 35-37 39-40 42-44 |
| | | | 47-48 51 59 73-74 80 |
| | | | 88 96-99 107 109 116 |
| | | | 121 138 145 148 162 |
| | | | 167-174 191-192 196 |
| | | | 209-213 215 218 221-222 |
| | | | 224-225 228 |
| induced neuron cells | Strategene | NTD001 | 163 192 209 224 |
| retinoid acid induced | Strategene | NTR001 | 211-213 223 |
| neuronal cells | | | |
| neuronal cells | Strategene | NTU001 | 2 8 14 39-40 209 211 |
| | | | 215 224 |
| placenta | Clontech | PLA003 | 145 |
| prostate | Clontech | PRT001 | 4 8 14 211 218 229 |
| | | | 235 |
| rectum | Invitrogen | REC001 | 12 14 48 73 96-99 |
| | | | 143 158-159 169-171 |
| | | | 174 196 211 224-225 |
| salivary gland | Clontech | SAL001 | 4 12 37 47-48 70 74 |
| | | | 107 109 114 121 144 |
| | | | 158-159 174 196 212-213 |
| | | | 220 |
| small intestine | Clontech | SIN001 | 12 39-40 47 74 82-83 |
| | | | 89-90 96-99 107 117-118 |
| | | | 173 191 222 224 |
| | | | 229 235 |
| skeletal muscle | Clontech | SKMs04 | 88 |
| spinal cord | Clontech | SPC001 | 1 4 14 27 88 91-92 |
| | | | 108 119-120 145 174 |
| | | | 212-213 220 235 |
| adult spleen | Clontech | SPLc01 | 158-159 219 229 235 |
| stomach | Clontech | STO001 | 4 37 48 93-95 115 |
| | | | 138 159 216-217 |
| thalamus | Clontech | THA002 | 37 94 125 139 174 |
| thymus | Clontech | THM001 | 8 12 22 25 39-40 84 |
| | | | 118 149 160 172 174 |
| | | | 191 212-213 222 |
| thymus | Clontech | THMc02 | 4-5 14 33 42-44 48 50 |
| | | | 57 59 73-74 78 96-99 |
| | | | 109 121 141 145 148 |
| | | | 155-162 172 187 191 |
| | | | 210 212-213 219 223 |
| | | | 228 |
| thyroid gland | Clontech | THR001 | 4 8-9 14 23 37 39-40 |
| | | | 48 54 57 74 86 100-101 |
| | | | 107 118 140 159 |
| | | | 169-171 196 209-211 |
| | | | 225 229 235 |
| trachea | Clontech | TRC001 | 11 37 48 85 95-99 |
| | | | 114 118 159 172 191 |
| | | | 212-213 |
| uterus | Clontech | UTR001 | 8 102-103 227 235 |

[0450] TABLE 2

| SEQ | | | | SMITH- | |
|---|---|---|---|---|---|
| ID | ACCESSION | | | WATERMAN | % |
| NO: | NUMBER | SPECIES | DESCRIPTION | SCORE | IDENTITY |
| 1 | AJ222644 | Arabidopsis | asparaginyl-tRNA | 659 | 50 |
| | | thaliana | synthetase | | |
| 2 | Y57899 | Homo | Human transmembrane | 2044 | 99 |
| | | sapiens | protein HTMPN-23. | | |
| 3 | Y20291 | Homo | Human apolipoprotein E | 1080 | 91 |
| | | sapiens | wild type protein | | |
| | | | fragment 1. | | |
| 4 | D42138 | Homo | PIG-B | 3001 | 100 |
| | | sapiens | | | |
| 5 | AF148145 | Mus | putative thymic stromal | 1459 | 78 |
| | | musculus | co-transporter TSCOT | | |
| 6 | X68657 | Rattus | granzyme-like protein II | 1138 | 89 |
| | | norvegicus | | | |
| 7 | Z74615 | Homo | prepro-alpha1(I) collagen | 8216 | 99 |
| | | sapiens | | | |
| 8 | D13623 | Rattus sp. | p34 protein | 1482 | 94 |
| 9 | Y94263 | Homo | Human phospholipid | 1185 | 99 |
| | | sapiens | binding protein 2, | | |
| | | | PLBP2. | | |
| 11 | Y29939 | Homo | Human retinol | 1663 | 100 |
| | | sapiens | dehydrogenase type II | | |
| | | | homologue. | | |
| 12 | Y14738 | Homo | immunoglobulin lambda | 1144 | 91 |
| | | sapiens | light chain | | |
| 13 | AF156549 | Mus | putative E1-E2 ATPase | 4825 | 79 |
| | | musculus | | | |
| 14 | Y00815 | Homo | put. LAR preprotein (AA- | 9947 | 99 |
| | | sapiens | 16 to 1881) | | |
| 19 | Y11584 | Homo | Human 5′ EST secreted | 192 | 100 |
| | | sapiens | protein SEQ ID NO: 236. | | |
| 25 | Y70210 | Homo | Human TANGO 130 | 991 | 95 |
| | | sapiens | protein. | | |
| 31 | D26093 | Gallus | VMO-I | 463 | 52 |
| | | gallus | | | |
| 32 | AE000658 | Homo | TCRAV4S1 | 558 | 100 |
| | | sapiens | | | |
| 33 | W64542 | Homo | Human stomach cancer | 483 | 100 |
| | | sapiens | cell clone HP10071 | | |
| | | | protein. | | |
| 34 | Y87342 | Homo | Human signal peptide | 690 | 100 |
| | | sapiens | containing protein HSPP- | | |
| | | | 119 SEQ ID NO: 119. | | |
| 35 | AL049795 | Homo | dJ622L5.8.1 (novel | 399 | 96 |
| | | sapiens | protein (isoform 1)) | | |
| 36 | AL049795 | Homo | dJ622L5.8.1 (novel | 458 | 100 |
| | | sapiens | protein (isoform 1)) | | |
| 37 | Y44273 | Homo | Human Metabotropic | 2458 | 99 |
| | | sapiens | Glutamate Receptor-like | | |
| | | | protein, MGRcm. | | |
| 39 | AF111713 | Homo | junctional adhesion | 1544 | 100 |
| | | sapiens | molecule | | |
| 40 | AF154005 | Homo | junction adhesion | 1333 | 100 |
| | | sapiens | molecule | | |
| 41 | Y35960 | Homo | Extended human secreted | 500 | 98 |
| | | sapiens | protein sequence, SEQ | | |
| | | | ID NO. 209. | | |
| 42 | AF247174 | synthetic | RP6-alkaline | 140 | 36 |
| | | construct | phosphatase hybrid | | |
| | | | protein | | |
| 43 | AF179415 | Dendroides | antifreeze protein 11 | 132 | 30 |
| | | canadensis | | | |
| 44 | W01049 | Homo | Product of 200 gene | 1580 | 99 |
| | | sapiens | differentially expressed | | |
| | | | in T helper cells. | | |
| 45 | AL121929 | Homo | bA416N2.2 (similar to | 5039 | 100 |
| | | sapiens | murine FISH (an SH3 | | |
| | | | and PX domain- | | |
| | | | containing protein, and | | |
| | | | Src substrate)) | | |
| 47 | X57816 | Homo | immunoglobulin lambda | 1212 | 100 |
| | | sapiens | light chain | | |
| 48 | W88464 | Homo | Monoclonal antibody | 2162 | 86 |
| | | sapiens | 4B5 heavy chain variable | | |
| | | | region. | | |
| 50 | AE003523 | Drosophila | CG7510 gene product | 280 | 54 |
| | | melanogaster | | | |
| 54 | AF231128 | Danio rerio | Dap1b | 165 | 42 |
| 55 | AB047612 | Macaca | hypothetical protein | 330 | 98 |
| | | fascicularis | | | |
| 56 | Y41701 | Homo | Human PRO708 protein | 1070 | 99 |
| | | sapiens | sequence. | | |
| 65 | Y73351 | Homo | HTRM clone 1484257 | 104 | 39 |
| | | sapiens | protein sequence. | | |
| 66 | AF188285 | Homo | bone morphogenetic | 2266 | 100 |
| | | sapiens | protein 9 | | |
| 73 | AE002038 | Deinococcus | ribosomal protein L20 | 202 | 41 |
| | | radiodurans | | | |
| 74 | AF157321 | Homo | 30 kDa protein | 1252 | 99 |
| | | sapiens | | | |
| 79 | AC004522 | Homo | gap junction protein; | 482 | 93 |
| | | sapiens | similar to P36383 | | |
| | | | (PID: g544117) | | |
| 80 | AL355715 | Homo | PCD9 | 2075 | 100 |
| | | sapiens | | | |
| 86 | Y76140 | Homo | Human secreted protein | 692 | 97 |
| | | sapiens | encoded by gene 17. | | |
| 88 | AL020993 | Homo | dJ5O6.2 (novel protein | 1545 | 100 |
| | | sapiens | similar to C. elegans | | |
| | | | F40E10.6 (isoform 1)) | | |
| 91 | AC004896 | Homo | similar to contactin | 157 | 58 |
| | | sapiens | associated protein; | | |
| | | | similar to U87223 | | |
| | | | (PID: g1857708) | | |
| 92 | G00517 | Homo | Human secreted protein, | 124 | 54 |
| | | sapiens | SEQ ID NO: 4598. | | |
| 94 | Y27593 | Homo | Human secreted protein | 248 | 58 |
| | | sapiens | encoded by gene No. 27. | | |
| 95 | Y92507 | Homo | Human OXRE-4 with | 1715 | 100 |
| | | sapiens | identity to 3-oxo-5-alpha- | | |
| | | | steroid dehydrogenase. | | |
| 96 | AJ006112 | Homo | anti-(ED-B) scFV | 1238 | 100 |
| | | sapiens | | | |
| 97 | AF174012 | Homo | immunoglobulin heavy | 692 | 91 |
| | | sapiens | chain variable region | | |
| | | | precursor | | |
| 98 | AJ006111 | Homo | anti-(ED-B) scFV | 1166 | 93 |
| | | sapiens | | | |
| 99 | AJ006112 | Homo | anti-(ED-B) scFV | 1046 | 84 |
| | | sapiens | | | |
| 102 | AF137378 | Homo | integrin alpha 11 subunit | 6224 | 99 |
| | | sapiens | precursor | | |
| 106 | W62068 | Homo | Human lung tissue gene | 333 | 97 |
| | | sapiens | LU103 protein. | | |
| 107 | X57802 | Homo | immunoglobulin lambda | 1160 | 95 |
| | | sapiens | light chain | | |
| 108 | Y41697 | Homo | Human PRO700 protein | 1441 | 100 |
| | | sapiens | sequence. | | |
| 109 | M12886 | Homo | T-cell receptor beta chain | 1590 | 98 |
| | | sapiens | | | |
| 110 | U71383 | Homo | OB binding protein-2 | 2913 | 99 |
| | | sapiens | | | |
| 111 | AB035356 | Homo | neurexin I-alpha protein | 4390 | 76 |
| | | sapiens | | | |
| 112 | L14851 | Rattus | neurexin III-alpha | 5614 | 97 |
| | | norvegicus | | | |
| 114 | X60660 | Rattus rattus | potential ligand-binding | 382 | 27 |
| | | | protein | | |
| 116 | L03785 | Homo | myosin regulatory light | 873 | 100 |
| | | sapiens | chain | | |
| 118 | Y58637 | Homo | Protein regulating gene | 246 | 30 |
| | | sapiens | expression PRGE-30. | | |
| 121 | M12886 | Homo | T-cell receptor beta chain | 1536 | 96 |
| | | sapiens | | | |
| 129 | AL031985 | Homo | dJ228H13.3 (zinc finger | 2364 | 100 |
| | | sapiens | protein) | | |
| 138 | Y59664 | Homo | Secreted protein 108- | 973 | 98 |
| | | sapiens | 004-5-0-E8-FL. | | |
| 139 | AF139980 | Homo | LW-1 | 2275 | 100 |
| | | sapiens | | | |
| 140 | Y28279 | Homo | Human G-protein | 742 | 100 |
| | | sapiens | coupled receptor GRIR- | | |
| | | | 1. | | |
| 141 | AF287892 | Homo | sialic acid binding | 1320 | 96 |
| | | sapiens | immunoglobulin-like | | |
| | | | lectin 8 long splice | | |
| | | | variant | | |
| 145 | X00699 | Homo | precursor | 1400 | 98 |
| | | sapiens | | | |
| 146 | AB036849 | Ciona | fibrinogen-like protein | 184 | 40 |
| | | intestinalis | | | |
| 148 | W78169 | Homo | Human secreted protein | 2114 | 98 |
| | | sapiens | encoded by gene 44 | | |
| | | | clone HETFJ05. | | |
| 154 | AF109683 | Homo | leukocyte-associated Ig- | 174 | 25 |
| | | sapiens | like receptor 1b | | |
| 155 | W99070 | Homo | Human PIGR-1. | 434 | 53 |
| | | sapiens | | | |
| 158 | AF184764 | Homo | IgG1 heavy chain | 939 | 79 |
| | | sapiens | | | |
| 159 | Y14737 | Homo | immunoglobulin lambda | 2559 | 100 |
| | | sapiens | heavy chain | | |
| 160 | AF043171 | Homo | T cell receptor alpha | 1479 | 100 |
| | | sapiens | chain | | |
| 162 | AB000199 | Rattus | CCA2 protein | 822 | 87 |
| | | norvegicus | | | |
| 163 | AF186273 | Homo | leucine-rich repeats | 251 | 32 |
| | | sapiens | containing F-box protein | | |
| | | | FBL3 | | |
| 164 | AF227924 | Homo | sialic acid-binding lectin | 2459 | 99 |
| | | sapiens | Siglec-9 | | |
| 167 | AF098807 | Homo | lipoma HMGIC fusion | 713 | 63 |
| | | sapiens | partner | | |
| 168 | AF098807 | Homo | lipoma HMGIC fusion | 443 | 57 |
| | | sapiens | partner | | |
| 169 | Y66706 | Homo | Membrane-bound protein | 2786 | 99 |
| | | sapiens | PRO1129. | | |
| 170 | Y66706 | Homo | Membrane-bound protein | 1733 | 98 |
| | | sapiens | PRO1129. | | |
| 171 | Y66706 | Homo | Membrane-bound protein | 1058 | 93 |
| | | sapiens | PRO1129. | | |
| 173 | W67898 | Homo | Human secreted protein | 838 | 95 |
| | | sapiens | encoded by gene 16 | | |
| | | | clone HE9DG49. | | |
| 174 | Y06115 | Homo | Human organic cation | 1876 | 100 |
| | | sapiens | transporter OCT-3. | | |
| 182 | G02872 | Homo | Human secreted protein, | 262 | 59 |
| | | sapiens | SEQ ID NO: 6953. | | |
| 186 | AE003652 | Drosophila | CG17996 gene product | 115 | 66 |
| | | melanogaster | | | |
| 187 | AF166350 | Homo | ST7 protein | 4716 | 100 |
| | | sapiens | | | |
| 189 | AF202889 | Homo | regeneration associated | 1864 | 100 |
| | | sapiens | protein 3 | | |
| 191 | AF090418 | Homo | scFV anitbody V-region | 1010 | 85 |
| | | sapiens | | | |
| 192 | AJ010231 | Homo | RET finger protein-like 2 | 1522 | 100 |
| | | sapiens | | | |
| 193 | U65579 | Homo | mitochondrial NADH | 981 | 89 |
| | | sapiens | dehydrogenase- | | |
| | | | ubiquinone Fe-S protein | | |
| | | | 8, 23 kDa subunit | | |
| | | | precursor | | |
| 196 | AF161444 | Homo | HSPC326 | 1467 | 96 |
| | | sapiens | | | |
| 199 | D26179 | Rattus | V-1 protein | 479 | 100 |
| | | norvegicus | | | |
| 208 | L22031 | Glycine | hydroxyproline-rich | 99 | 34 |
| | | max | glycoprotein | | |
| 209 | AF201931 | Homo | DC1 | 1662 | 99 |
| | | sapiens | | | |
| 210 | W74882 | Homo | Human secreted protein | 480 | 100 |
| | | sapiens | encoded by gene 154 | | |
| | | | clone HE6FL83. | | |
| 211 | U53925 | Mus | transcription factor C1 | 297 | 31 |
| | | musculus | (HCF) | | |
| 212 | AJ251914 | Sus scrofa | putative RNA helicase | 2199 | 100 |
| 213 | AJ251914 | Sus scrofa | putative RNA helicase | 1571 | 100 |
| 214 | X04494 | Homo | precursor polypeptide | 1903 | 100 |
| | | sapiens | | | |
| 215 | Y66699 | Homo | Membrane-bound protein | 2374 | 100 |
| | | sapiens | PRO1108. | | |
| 216 | AJ130710 | Homo | QA79 membrane protein, | 2473 | 100 |
| | | sapiens | allelic variant airm-1b | | |
| 217 | AJ130711 | Homo | QA79 membrane protein, | 1969 | 100 |
| | | sapiens | splice product airm-2 | | |
| 218 | AF233523 | Homo | beta V spectrin | 18612 | 99 |
| | | sapiens | | | |
| 219 | AF127481 | Homo | non-ocogenic Rho | 743 | 36 |
| | | sapiens | GTPase-specific GTP | | |
| | | | exchange factor | | |
| 220 | Y71066 | Homo | Human membrane | 2378 | 99 |
| | | sapiens | transport protein, MTRP- | | |
| | | | 11. | | |
| 221 | AF132730 | Homo | unknown | 1899 | 100 |
| | | sapiens | | | |
| 223 | W54097 | Homo | Homo sapiens B223 | 1834 | 99 |
| | | sapiens | sequence. | | |
| 224 | Y99449 | Homo | Human PRO1760 | 1017 | 100 |
| | | sapiens | (UNQ833) amino acid | | |
| | | | sequence SEQ ID | | |
| | | | NO: 376. | | |
| 225 | Y92368 | Homo | G protein-coupled | 2293 | 100 |
| | | sapiens | receptor protein 8. | | |
| 227 | Y99436 | Homo | Human PRO1474 | 464 | 100 |
| | | sapiens | (UNQ745) amino acid | | |
| | | | sequence SEQ ID | | |
| | | | NO: 334. | | |
| 228 | AK024825 | Homo | unnamed protein product | 1375 | 99 |
| | | sapiens | | | |
| 229 | G03186 | Homo | Human secreted protein, | 307 | 96 |
| | | sapiens | SEQ ID NO: 7267. | | |
| 235 | AB025606 | Arabidopsis | contains similarity to | 753 | 46 |
| | | thaliana | GTPase activating | | |
| | | | protein˜gene_id: F6N7.7 | | |

[0451] TABLE 3

| SEQ ID | ACCESSION | | |
|---|---|---|---|
| NO: | NO. | DESCRIPTION | RESULTS* |
| 1 | PF00152 | tRNA synthetases class II. | PF00152D 21.30 8.364e−28 422-461 |
| | | | PF00152C 28.03 9.250e−21 220-257 |
| | | | PF00152B 15.67 2.658e−13 159-184 |
| | | | PF00152A 19.68 5.714e−11 44-67 |
| 2 | PR00237 | RHODOPSIN-LIKE | PR00237F 13.57 5.263e−09 158-183 |
| | | GPCR SUPERFAMILY | |
| | | SIGNATURE | |
| 3 | PD02807 | APOLIPOPROTEIN E | PD02807B 8.27 1.000e−40 64-103 |
| | | PRECURSOR APO-E | PD02807C 8.91 1.000e−40 139-188 |
| | | GLYCOPROTEIN PLAS. | PD02807D 7.99 1.000e−40 188-238 |
| | | | PD02807A 12.43 6.143e−25 27-48 |
| | | | PD02807C 8.91 5.645e−09 95-144 |
| 5 | PD01572 | PHOTOSYSTEM II | PD01572 8.77 6.917e−09 213-243 |
| | | REACTION CENTRE T | |
| | | PROTEIN PHOTOS. | |
| 6 | BL00134 | Serine proteases, trypsin | BL00134A 11.96 2.125e−15 50-67 |
| | | family, histidine proteins. | BL00134B 15.99 7.618e−13 195-219 |
| 7 | DM01418 | 352 FIBRILLAR | DM01418A 20.83 1.000e−40 1252-1300 |
| | | COLLAGEN | DM01418B 22.51 1.000e−40 1351-1393 |
| | | CARBOXYL- | DM01418C 20.48 5.500e−40 1422-1464 |
| | | TERMINAL. | |
| 8 | BL00224 | Clathrin light chain | BL00224B 16.94 1.082e−09 166-219 |
| | | proteins. | |
| 9 | BL01220 | Phosphatidylethanolamine- | BL01220B 16.65 6.774e−23 85-126 |
| | | binding protein family | BL01220C 14.75 5.857e−17 130-158 |
| | | proteins. | |
| 11 | PR00081 | GLUCOSE/RIBITOL | PR00081C 15.13 5.846e−11 151-168 |
| | | DEHYDROGENASE | |
| | | FAMILY SIGNATURE | |
| 12 | BL00290 | Immunoglobulins and | BL00290A 20.89 1.529e−14 159-182 |
| | | major histocompatibility | BL00290B 13.17 9.000e−12 219-237 |
| | | complex proteins. | |
| 13 | PR00121 | SODIUM/POTASSIUM- | PR00121D 16.72 2.694e−12 113-135 |
| | | TRANSPORTING | |
| | | ATPASE SIGNATURE | |
| 14 | PR00700 | PROTEIN TYROSINE | PR00700B 16.80 1.500e−24 1420-1441 |
| | | PHOSPHATASE | PR00700D 12.47 4.214e−22 1543-1562 |
| | | SIGNATURE | PR00700B 16.80 4.240e−21 1709-1730 |
| | | | PR00700D 12.47 7.158e−20 1834-1853 |
| | | | PR00700C 13.17 5.800e−18 1504-1522 |
| | | | PR00700C 13.17 7.353e−17 1793-1811 |
| | | | PR00700E 17.57 4.000e−14 1865-1881 |
| | | | PR00700F 11.18 7.353e−13 1590-1601 |
| | | | PR00700F 11.18 1.429e−12 1881-1892 |
| | | | PR00700E 17.57 5.304e−12 1574-1590 |
| | | | PR00700A 6.96 8.714e−11 1404-1412 |
| 31 | PD02382 | RECEPTOR CHAIN | PD02382B 4.60 7.000e−09 105-112 |
| | | PRECURSOR | |
| | | TRANSME. | |
| 37 | BL00979 | G-protein coupled | BL00979L 20.63 2.485e−09 150-191 |
| | | receptors family 3 proteins. | |
| 39 | DM00179 | w KINASE ALPHA | DM00179 13.97 1.000e−11 102-112 |
| | | ADHESION T-CELL. | |
| 40 | DM00179 | w KINASE ALPHA | DM00179 13.97 1.000e−11 62-72 |
| | | ADHESION T-CELL. | |
| 45 | BL50002 | Src homology 3 (SH3) | BL50002B 15.18 3.000e−09 953-967 |
| | | domain proteins profile. | |
| 47 | BL00290 | Immunoglobulins and | BL00290A 20.89 1.529e−14 150-173 |
| | | major histocompatibility | BL00290B 13.17 9.000e−12 210-228 |
| | | complex proteins. | |
| 48 | DM00031 | IMMUNOGLOBULIN V | DM00031A 16.80 9.775e−36 20-68 |
| | | REGION. | DM00031B 15.41 7.600e−21 84-118 |
| | | | DM00031C 12.79 8.929e−10 131-142 |
| 56 | BL00523 | Sulfatases proteins. | BL00523C 12.64 4.000e−13 314-325 |
| | | | BL00523A 13.36 7.300e−13 222-239 |
| | | | BL00523B 8.64 6.114e−11 268-280 |
| 65 | BL00028 | Zinc finger, C2H2 type, | BL00028 16.07 4.115e−11 204-221 |
| | | domain proteins. | |
| 66 | BL00250 | TGF-beta family proteins. | BL00250A 21.24 3.000e−24 327-363 |
| | | | BL00250B 27.37 1.000e−15 393-429 |
| 73 | PR00062 | RIBOSOMAL PROTEIN | PR00062C 16.68 7.245e−15 82-109 |
| | | L20 SIGNATURE | PR00062B 16.66 2.658e−11 49-79 |
| 79 | BL00407 | Connexins proteins. | BL00407E 22.17 8.820e−23 169-214 |
| | | | BL00407B 14.23 6.311e−20 39-70 |
| | | | BL00407C 14.61 1.164e−18 70-98 |
| | | | BL00407A 18.57 6.250e−13 2-39 |
| | | | BL00407D 17.61 5.790e−12 131-161 |
| 96 | BL00290 | Immunoglobulins and | BL00290A 20.89 3.520e−10 281-304 |
| | | major histocompatibility | |
| | | complex proteins. | |
| 97 | DM00031 | IMMUNOGLOBULIN V | DM00031A 16.80 1.000e−40 20-68 |
| | | REGION. | DM00031B 15.41 1.000e−36 84-118 |
| | | | DM00031C 12.79 1.600e−15 127-138 |
| 98 | BL00290 | Immunoglobulins and | BL00290A 20.89 3.520e−10 286-309 |
| | | major histocompatibility | |
| | | complex proteins. | |
| 99 | BL00290 | Immunoglobulins and | BL00290B 13.17 4.000e−12 341-359 |
| | | major histocompatibility | BL00290A 20.89 3.520e−10 280-303 |
| | | complex proteins. | |
| 102 | PR00453 | VON WILLEBRAND | PR00453A 12.79 9.719e−13 163-181 |
| | | FACTOR TYPE A | PR00453B 14.65 1.818e−12 200-215 |
| | | DOMAIN SIGNATURE | PR00453C 12.26 3.769e−10 265-274 |
| 107 | BL00290 | Immunoglobulins and | BL00290A 20.89 1.563e−15 151-174 |
| | | major histocompatibility | BL00290B 13.17 9.000e−12 211-229 |
| | | complex proteins. | |
| 108 | BL00194 | Thioredoxin family | BL00194 12.16 2.565e−13 46-59 |
| | | proteins. | BL00194 12.16 3.348e−13 179-192 |
| 109 | BL00290 | Immunoglobulins and | BL00290A 20.89 8.200e−12 160-183 |
| | | major histocompatibility | |
| | | complex proteins. | |
| 111 | BL00964 | Syndecans proteins. | BL00964B 12.05 2.604e−10 981-1024 |
| 112 | BL00964 | Syndecans proteins. | BL00964B 12.05 2.604e−10 1011-1054 |
| 114 | BL00400 | LBP/BPI/CETP family | BL00400D 23.26 7.222e−12 251-288 |
| | | proteins. | |
| 116 | BL00018 | EF-hand calcium-binding | BL00018 7.41 1.391e−09 43-56 |
| | | domain proteins. | |
| 121 | BL00290 | Immunoglobulins and | BL00290A 20.89 8.200e−12 159-182 |
| | | major histocompatibility | |
| | | complex proteins. | |
| 129 | BL00028 | Zinc finger, C2H2 type, | BL00028 16.07 8.875e−15 347-364 |
| | | domain proteins. | BL00028 16.07 6.824e−14 207-224 |
| | | | BL00028 16.07 7.353e−14 403-420 |
| | | | BL00028 16.07 8.650e−13 235-252 |
| | | | BL00028 16.07 8.435e−12 319-336 |
| | | | BL00028 16.07 3.077e−11 291-308 |
| | | | BL00028 16.07 3.769e−11 263-280 |
| | | | BL00028 16.07 5.154e−11 179-196 |
| | | | BL00028 16.07 4.000e−10 375-392 |
| 132 | PR00836 | SOMATOTROPIN | PR00836B 16.59 8.347e−09 3-22 |
| | | HORMONE FAMILY | |
| | | SIGNATURE | |
| 139 | PR00056 | HEAT SHOCK FACTOR | PR00056C 14.47 7.823e−12 153-166 |
| | | (HSF) DOMAIN | |
| | | SIGNATURE | |
| 140 | PR00245 | OLFACTORY | PR00245A 18.03 7.300e−19 82-104 |
| | | RECEPTOR SIGNATURE | |
| 145 | PF00969 | Class II histocompatibility | PF00969B 9.97 1.000e−40 58-94 |
| | | antigen, beta domain | PF00969C 27.72 1.000e−40 97-147 |
| | | proteins. | PF00969E 11.49 1.000e−39 212-247 |
| | | | PF00969A 22.07 3.520e−38 12-55 |
| | | | PF00969D 14.02 4.789e−36 154-184 |
| 146 | BL00514 | Fibrinogen beta and | BL00514C 17.41 2.579e−24 181-218 |
| | | gamma chains C-terminal | BL00514G 15.98 9.111e−12 262-292 |
| | | domain proteins. | |
| 155 | DM01688 | 2 POLY-IG RECEPTOR. | DM01688B 15.06 3.628e−09 82-130 |
| 158 | DM00031 | IMMUNOGLOBULIN V | DM00031A 16.80 1.000e−40 20-68 |
| | | REGION. | DM00031B 15.41 5.865e−25 86-120 |
| | | | DM00031C 12.79 4.429e−10 129-140 |
| 159 | DM00031 | IMMUNOGLOBULIN V | DM00031A 16.80 1.000e−40 20-68 |
| | | REGION. | DM00031B 15.41 1.000e−40 84-118 |
| | | | DM00031C 12.79 1.600e−15 134-145 |
| 160 | DM00031 | IMMUNOGLOBULIN V | DM00031B 15.41 6.294e−12 85-119 |
| | | REGION. | |
| 162 | PF01073 | 3-beta hydroxysteriod | PF01073A 18.01 9.206e−22 140-193 |
| | | dehydrogenase/isomerase | PF01073B 12.26 6.831e−19 222-267 |
| | | family. | PF01073C 10.62 2.645e−17 322-370 |
| 169 | BL00086 | Cytochrome P450 cysteine | BL00086 20.87 3.813e−24 480-512 |
| | | heme-iron ligand proteins. | |
| 170 | BL00086 | Cytochrome P450 cysteine | BL00086 20.87 3.813e−24 502-534 |
| | | heme-iron ligand proteins. | |
| 171 | BL00086 | Cytochrome P450 cysteine | BL00086 20.87 3.813e−24 363-395 |
| | | heme-iron ligand proteins. | |
| 173 | BL00453 | FKBP-type peptidyl-prolyl | BL00453B 23.86 3.000e−20 87-121 |
| | | cis-trans isomerase | BL00453A 15.57 9.379e−10 63-78 |
| | | proteins. | |
| 174 | BL00216 | Sugar transport proteins. | BL00216B 27.64 4.900e−10 240-290 |
| 187 | BL01209 | LDL-receptor class A | BL01209 9.31 5.500e−11 470-483 |
| | | (LDLRA) domain proteins. | BL01209 9.31 2.212e−10 395-408 |
| | | | BL01209 9.31 6.365e−10 433-446 |
| | | | BL01209 9.31 8.962e−10 239-252 |
| 189 | PD01733 | APOLIPOPROTEIN | PD01733B 20.44 6.600e−14 109-164 |
| | | PLASMA LIPID | |
| | | TRANSPORT H. | |
| 190 | PR00237 | RHODOPSIN-LIKE | PR00237E 13.03 8.412e−09 15-39 |
| | | GPCR SUPERFAMILY | |
| | | SIGNATURE | |
| 191 | DM00031 | IMMUNOGLOBULIN V | DM00031A 16.80 1.000e−40 61-109 |
| | | REGION. | DM00031B 15.41 1.000e−40 125-159 |
| | | | DM00031C 12.79 1.600e−15 174-185 |
| | | | DM00031B 15.41 9.544e−09 245-279 |
| 192 | PF00622 | Domain in SPla and the | PF00622B 21.00 8.250e−11 161-183 |
| | | RYanodine Receptor. | |
| 193 | BL00198 | 4Fe-4S ferredoxins, iron- | BL00198 10.43 5.263e−12 152-164 |
| | | sulfur binding region | BL00198 10.43 1.346e−10 113-125 |
| | | proteins. | |
| 199 | PF00023 | Ank repeat proteins. | PF00023A 16.03 8.000e−12 90-106 |
| 208 | BL00127 | Pancreatic ribonuclease | BL00127C 31.49 7.288e−09 33-77 |
| | | family proteins. | |
| 210 | BL01310 | ATP1G1/PLM/MAT8 | BL01310 14.74 2.432e−29 71-107 |
| | | family proteins. | |
| 212 | BL00039 | DEAD-box subfamily | BL00039D 21.67 5.000e−26 340-386 |
| | | ATP-dependent helicases | BL00039A 18.44 6.114e−17 64-103 |
| | | proteins. | BL00039B 19.19 3.681e−11 104-130 |
| 213 | BL00039 | DEAD-box subfamily | BL00039D 21.67 5.000e−26 314-360 |
| | | ATP-dependent helicases | BL00039A 18.44 6.114e−17 64-103 |
| | | proteins. | BL00039B 19.19 3.681e−11 104-130 |
| 214 | BL00280 | Pancreatic trypsin inhibitor | BL00280 24.61 6.727e−38 238-282 |
| | | (Kunitz) family proteins. | BL00280 24.61 1.514e−30 294-338 |
| 216 | PF00064 | Neuraminidases. | PF00064D 17.65 8.830e−09 11-50 |
| 217 | PF00064 | Neuraminidases. | PF00064D 17.65 8.830e−09 11-50 |
| 218 | BL00019 | Actinin-type actin-binding | BL00019D 15.33 7.585e−21 196-226 |
| | | domain proteins. | BL00019C 14.66 9.143e−20 128-164 |
| | | | BL00019A 12.56 5.408e−12 56-67 |
| | | | BL00019B 13.34 9.795e−12 83-106 |
| 219 | PR00194 | TROPOMYOSIN | PR00194D 9.57 1.240e−10 391-415 |
| | | SIGNATURE | |
| 220 | BL00594 | Aromatic amino acids | BL00594A 16.75 4.743e−09 56-100 |
| | | permeases proteins. | |
| 222 | BL00415 | Synapsins proteins. | BL00415N 4.29 8.695e−10 335-379 |
| 223 | PR00217 | 43 KD POSTSYNAPTIC | PR00217C 10.91 7.725e−09 302-318 |
| | | PROTEIN SIGNATURE | |
| 225 | PD02918 | AMINOGLYCOSIDE N3′- | PD02918A 18.79 3.621e−09 345-385 |
| | | ACETYLTRANSFERASE | |
| | | III. | |
| 227 | BL00282 | Kazal serine protease | BL00282 16.88 4.717e−18 45-68 |
| | | inhibitors family proteins. | |
| 235 | PR00356 | TYPE II ANTIFREEZE | PR00356G 10.80 8.644e−09 536-550 |
| | | PROTEIN SIGNATURE | |

*results include in order: accession number subtype, raw score; p-value; position of signature in amino acid sequence.

[0452] TABLE 4

| SEQ | | | | |
|---|---|---|---|---|
| ID | | | | PFAM |
| NO: | PFAM NAME | DESCRIPTION | p-value | SCORE |
| 1 | tRNA-synt_2 | tRNA synthetases class II (D, K and | 1.1e−84 | 294.8 |
| | | N) | | |
| 3 | Apolipoprotein | Apolipoprotein A1/A4/E family | 7.3e−91 | 315.3 |
| 6 | trypsin | Trypsin | 2.9e−59 | 189.2 |
| 7 | Collagen | Collagen triple helix repeat (20 | 4.1e−290 | 977.2 |
| | | copies) | | |
| 8 | LRR | Leucine Rich Repeat | 2.9e−13 | 57.5 |
| 9 | PBP | Phosphatidylethanolamine-binding | 1.4e−17 | 71.9 |
| | | protein | | |
| 11 | adh_short | short chain dehydrogenase | 7e−43 | 155.9 |
| 12 | ig | Immunoglobulin domain | 2.1e−14 | 51.4 |
| 14 | Y_phosphatase | Protein-tyrosine phosphatase | 4.8e−299 | 1006.8 |
| 25 | SH3 | SH3 domain | 0.026 | 5.2 |
| 32 | ig | Immunoglobulin domain | 1.8e−09 | 35.6 |
| 37 | 7tm_3 | 7 transmembrane receptor | 7.2e−09 | 29.0 |
| 39 | ig | Immunoglobulin domain | 1.4e−20 | 71.3 |
| 40 | ig | Immunoglobulin domain | 2.6e−15 | 54.4 |
| 45 | SH3 | SH3 domain | 1.4e−42 | 154.9 |
| 47 | ig | Immunoglobulin domain | 2.5e−16 | 57.7 |
| 48 | ig | Immunoglobulin domain | 1.6e−24 | 84.1 |
| 65 | zf-C2H2 | Zinc finger, C2H2 type | 2.7e−06 | 34.3 |
| 66 | TGF-beta | Transforming growth factor beta like | 6.9e−64 | 197.9 |
| 73 | Ribosomal_L20 | Ribosomal protein L20 | 2e−22 | 74.0 |
| 79 | connexin | Connexin | 1.6e−50 | 181.3 |
| 96 | ig | Immunoglobulin domain | 2.5e−26 | 89.9 |
| 97 | ig | Immunoglobulin domain | 1.5e−08 | 32.6 |
| 98 | ig | Immunoglobulin domain | 3.6e−25 | 86.1 |
| 99 | ig | Immunoglobulin domain | 7.6e−33 | 110.9 |
| 102 | FG-GAP | FG-GAP repeat | 6.9e−66 | 232.3 |
| 107 | ig | Immunoglobulin domain | 1.3e−16 | 58.6 |
| 108 | thiored | Thioredoxin | 2.8e−79 | 267.1 |
| 109 | ig | Immunoglobulin domain | 2.9e−16 | 57.5 |
| 110 | ig | Immunoglobulin domain | 4.6e−13 | 47.1 |
| 111 | laminin_G | Laminin G domain | 2.4e−63 | 223.9 |
| 112 | laminin_G | Laminin G domain | 2.4e−63 | 223.9 |
| 114 | LBP_BPI_CETP | LBP/BPI/CETP family | 2.6e−06 | −2.4 |
| 116 | efhand | EF hand | 1.1e−14 | 62.2 |
| 118 | SAP | SAP domain | 4.8e−12 | 53.5 |
| 121 | ig | Immunoglobulin domain | 2.9e−16 | 57.5 |
| 129 | zf-C2H2 | Zinc finger, C2H2 type | 1.7e−64 | 227.7 |
| 139 | HSF_DNA-bind | HSF-type DNA-binding domain | 1.7e−05 | 22.3 |
| 140 | 7tm_1 | 7 transmembrane receptor (rhodopsin | 1.1e−15 | 52.0 |
| | | family) | | |
| 141 | ig | Immunoglobulin domain | 9.4e−09 | 33.3 |
| 145 | MHC_II_beta | Class II histocompatibility antigen, | 2.7e−29 | 110.7 |
| | | beta | | |
| 146 | fibrinogen_C | Fibrinogen beta and gamma chains; | 1.3e−35 | 125.6 |
| | | C-term | | |
| 154 | ig | Immunoglobulin domain | 6.7e−05 | 20.8 |
| 155 | ig | Immunoglobulin domain | 0.00022 | 19.2 |
| 158 | ig | Immunoglobulin domain | 7e−19 | 65.9 |
| 159 | ig | Immunoglobulin domain | 3.5e−28 | 95.9 |
| 160 | ig | Immunoglobulin domain | 2.4e−06 | 25.5 |
| 162 | 3Beta_HSD | 3-beta hydroxysteroid | 1e−199 | 676.9 |
| | | dehydrogenase/isomera | | |
| 164 | ig | Immunoglobulin domain | 2.1e−09 | 35.3 |
| 169 | p450 | Cytochrome P450 | 8.9e−141 | 481.1 |
| 170 | p450 | Cytochrome P450 | 2.1e−131 | 450.0 |
| 171 | p450 | Cytochrome P450 | 1.7e−112 | 387.1 |
| 173 | FKBP | FKBP-type peptidyl-prolyl cis-trans | 5.1e−27 | 89.2 |
| | | isomeras | | |
| 174 | sugar_tr | Sugar (and other) transporter | 0.014 | −120.6 |
| 187 | CUB | CUB domain | 2.2e−56 | 200.7 |
| 189 | Apolipoprotein | Apolipoprotein A1/A4/E family | 1.6e−06 | 34.6 |
| 191 | ig | Immunoglobulin domain | 1.7e−24 | 84.0 |
| 192 | SPRY | SPRY domain | 6.2e−13 | 56.4 |
| 193 | fer4 | 4Fe-4S binding domain | 1.6e−13 | 58.4 |
| 199 | ank | Ank repeat | 2.7e−09 | 44.3 |
| 209 | zf-DHHC | DHHC zinc finger domain | 4.6e−24 | 93.4 |
| 210 | ATP1G1_PLM_MAT8 | ATP1G1/PLM/MAT8 family | 9.3e−22 | 85.7 |
| 211 | Kelch | Kelch motif | 0.02 | 20.8 |
| 212 | DEAD | DEAD/DEAH box helicase | 2.8e−52 | 168.3 |
| 213 | DEAD | DEAD/DEAH box helicase | 2.8e−52 | 168.3 |
| 214 | Kunitz_BPTI | Kunitz/Bovine pancreatic trypsin | 3.7e−47 | 148.6 |
| | | inhibito | | |
| 215 | Acyltransferase | Acyltransferase | 0.0023 | 4.4 |
| 216 | ig | Immunoglobulin domain | 1.7e−10 | 38.9 |
| 217 | ig | Immunoglobulin domain | 1.1e−08 | 33.1 |
| 218 | spectrin | Spectrin repeat | 0 | 1209.7 |
| 219 | PH | PH domain | 5.3e−08 | 33.6 |
| 220 | Aa_trans | Transmembrane amino acid | 1.5e−21 | 85.0 |
| | | transporter protein | | |
| 223 | zf-C3HC4 | Zinc finger, C3HC4 type (RING | 7.7e−07 | 26.4 |
| | | finger) | | |
| 224 | PA | PA domain | 0.00022 | 28.0 |
| 227 | kazal | Kazal-type serine protease inhibitor | 5.6e−13 | 56.6 |
| | | domain | | |
| 235 | TBC | TBC domain | 4.7e−45 | 163.1 |

[0453] TABLE 5

| | POSITION OF | MaxS | |
|---|---|---|---|
| SEQ | SIGNAL IN AMINO | (MAXIMUM | MeanS (MEAN |
| ID NO: | ACID SEQUENCE | SCORE) | SCORE) |
| 1 | 1-16 | 0.907 | 0.635 |
| 2 | 1-45 | 0.970 | 0.723 |
| 3 | 1-31 | 0.970 | 0.770 |
| 4 | 1-25 | 0.929 | 0.655 |
| 5 | 1-28 | 0.990 | 0.860 |
| 6 | 1-18 | 0.977 | 0.916 |
| 7 | 1-22 | 0.990 | 0.921 |
| 8 | 1-45 | 0.973 | 0.605 |
| 9 | 1-22 | 0.991 | 0.915 |
| 10 | 1-18 | 0.910 | 0.637 |
| 11 | 1-20 | 0.997 | 0.915 |
| 12 | 1-21 | 0.967 | 0.949 |
| 13 | 1-22 | 0.985 | 0.949 |
| 14 | 1-29 | 0.932 | 0.690 |
| 15 | 1-15 | 0.933 | 0.831 |
| 16 | 1-19 | 0.985 | 0.932 |
| 17 | 1-21 | 0.996 | 0.951 |
| 18 | 1-18 | 0.942 | 0.764 |
| 19 | 1-18 | 0.954 | 0.725 |
| 20 | 1-29 | 0.891 | 0.625 |
| 21 | 1-31 | 0.992 | 0.895 |
| 22 | 1-18 | 0.974 | 0.820 |
| 23 | 1-46 | 0.994 | 0.917 |
| 24 | 1-32 | 0.983 | 0.865 |
| 26 | 1-22 | 0.975 | 0.874 |
| 27 | 1-19 | 0.943 | 0.723 |
| 28 | 1-21 | 0.971 | 0.925 |
| 30 | 1-31 | 0.970 | 0.770 |
| 31 | 1-26 | 0.958 | 0.844 |
| 32 | 1-19 | 0.959 | 0.930 |
| 34 | 1-41 | 0.958 | 0.553 |
| 35 | 1-11 | 0.888 | 0.610 |
| 36 | 1-29 | 0.888 | 0.611 |
| 38 | 1-32 | 0.917 | 0.567 |
| 39 | 1-27 | 0.978 | 0.895 |
| 40 | 1-25 | 0.929 | 0.655 |
| 44 | 1-21 | 0.972 | 0.946 |
| 46 | 1-28 | 0.955 | 0.806 |
| 47 | 1-19 | 0.985 | 0.892 |
| 48 | 1-19 | 0.981 | 0.955 |
| 49 | 1-21 | 0.977 | 0.675 |
| 52 | 1-23 | 0.976 | 0.920 |
| 53 | 1-19 | 0.988 | 0.936 |
| 55 | 1-15 | 0.901 | 0.782 |
| 58 | 1-24 | 0.953 | 0.772 |
| 59 | 1-32 | 0.992 | 0.943 |
| 61 | 1-19 | 0.896 | 0.566 |
| 62 | 1-37 | 0.915 | 0.693 |
| 66 | 1-22 | 0.978 | 0.889 |
| 67 | 1-24 | 0.922 | 0.563 |
| 68 | 1-18 | 0.962 | 0.763 |
| 69 | 1-31 | 0.990 | 0.773 |
| 70 | 1-21 | 0.902 | 0.802 |
| 71 | 1-31 | 0.922 | 0.604 |
| 72 | 1-22 | 0.932 | 0.645 |
| 74 | 1-32 | 0.947 | 0.669 |
| 75 | 1-20 | 0.973 | 0.832 |
| 76 | 1-24 | 0.933 | 0.597 |
| 77 | 1-42 | 0.964 | 0.719 |
| 79 | 1-45 | 0.973 | 0.605 |
| 82 | 1-18 | 0.975 | 0.870 |
| 83 | 1-25 | 0.990 | 0.919 |
| 85 | 1-18 | 0.946 | 0.753 |
| 87 | 1-20 | 0.976 | 0.854 |
| 89 | 1-27 | 0.990 | 0.907 |
| 90 | 1-23 | 0.890 | 0.717 |
| 92 | 1-40 | 0.881 | 0.660 |
| 93 | 1-36 | 0.886 | 0.568 |
| 95 | 1-41 | 0.994 | 0.804 |
| 96 | 1-19 | 0.975 | 0.901 |
| 97 | 1-19 | 0.975 | 0.901 |
| 98 | 1-19 | 0.975 | 0.901 |
| 99 | 1-19 | 0.975 | 0.901 |
| 100 | 1-18 | 0.990 | 0.955 |
| 101 | 1-36 | 0.998 | 0.907 |
| 102 | 1-22 | 0.932 | 0.756 |
| 103 | 1-15 | 0.928 | 0.793 |
| 104 | 1-45 | 0.992 | 0.911 |
| 105 | 1-20 | 0.988 | 0.926 |
| 107 | 1-19 | 0.985 | 0.892 |
| 109 | 1-15 | 0.983 | 0.953 |
| 110 | 1-16 | 0.969 | 0.894 |
| 113 | 1-19 | 0.941 | 0.828 |
| 114 | 1-20 | 0.989 | 0.973 |
| 115 | 1-23 | 0.960 | 0.786 |
| 117 | 1-22 | 0.886 | 0.663 |
| 119 | 1-18 | 0.960 | 0.820 |
| 120 | 1-16 | 0.924 | 0.582 |
| 121 | 1-16 | 0.987 | 0.929 |
| 122 | 1-22 | 0.992 | 0.956 |
| 123 | 1-23 | 0.929 | 0.588 |
| 126 | 1-41 | 0.968 | 0.792 |
| 127 | 1-34 | 0.930 | 0.665 |
| 128 | 1-42 | 0.957 | 0.653 |
| 130 | 1-21 | 0.897 | 0.632 |
| 131 | 1-25 | 0.983 | 0.845 |
| 132 | 1-13 | 0.947 | 0.915 |
| 133 | 1-13 | 0.930 | 0.824 |
| 134 | 1-22 | 0.947 | 0.857 |
| 135 | 1-25 | 0.978 | 0.936 |
| 137 | 1-17 | 0.960 | 0.878 |
| 141 | 1-16 | 0.983 | 0.952 |
| 142 | 1-23 | 0.945 | 0.798 |
| 145 | 1-29 | 0.979 | 0.884 |
| 146 | 1-25 | 0.922 | 0.765 |
| 147 | 1-37 | 0.928 | 0.786 |
| 148 | 1-28 | 0.981 | 0.890 |
| 150 | 1-20 | 0.986 | 0.965 |
| 151 | 1-20 | 0.987 | 0.886 |
| 152 | 1-18 | 0.922 | 0.809 |
| 153 | 1-19 | 0.887 | 0.607 |
| 154 | 1-16 | 0.964 | 0.790 |
| 155 | 1-17 | 0.984 | 0.973 |
| 156 | 1-21 | 0.929 | 0.692 |
| 157 | 1-21 | 0.937 | 0.836 |
| 158 | 1-19 | 0.897 | 0.722 |
| 159 | 1-19 | 0.985 | 0.932 |
| 160 | 1-21 | 0.978 | 0.833 |
| 161 | 1-20 | 0.940 | 0.632 |
| 165 | 1-20 | 0.954 | 0.696 |
| 167 | 1-20 | 0.988 | 0.963 |
| 168 | 1-20 | 0.986 | 0.952 |
| 169 | 1-8 | 0.983 | 0.634 |
| 170 | 1-8 | 0.983 | 0.634 |
| 171 | 1-40 | 0.994 | 0.888 |
| 173 | 1-27 | 0.982 | 0.925 |
| 174 | 1-17 | 0.989 | 0.945 |
| 176 | 1-21 | 0.987 | 0.919 |
| 177 | 1-21 | 0.950 | 0.596 |
| 178 | 1-22 | 0.986 | 0.949 |
| 179 | 1-18 | 0.942 | 0.764 |
| 181 | 1-16 | 0.917 | 0.618 |
| 182 | 1-23 | 0.963 | 0.889 |
| 183 | 1-25 | 0.992 | 0.968 |
| 184 | 1-19 | 0.945 | 0.638 |
| 185 | 1-31 | 0.964 | 0.709 |
| 186 | 1-37 | 0.978 | 0.830 |
| 187 | 1-27 | 0.947 | 0.799 |
| 190 | 1-41 | 0.972 | 0.836 |
| 193 | 1-16 | 0.900 | 0.664 |
| 194 | 1-35 | 0.988 | 0.912 |
| 195 | 1-16 | 0.944 | 0.837 |
| 196 | 1-28 | 0.925 | 0.626 |
| 197 | 1-20 | 0.962 | 0.811 |
| 198 | 1-21 | 0.947 | 0.701 |
| 199 | 1-20 | 0.945 | 0.854 |
| 200 | 1-34 | 0.967 | 0.718 |
| 201 | 1-32 | 0.994 | 0.956 |
| 203 | 1-18 | 0.953 | 0.786 |
| 204 | 1-24 | 0.968 | 0.728 |
| 205 | 1-32 | 0.920 | 0.623 |
| 206 | 1-27 | 0.974 | 0.843 |
| 208 | 1-31 | 0.986 | 0.878 |
| 209 | 1-29 | 0.997 | 0.854 |
| 214 | 1-19 | 0.986 | 0.967 |
| 215 | 1-37 | 0.981 | 0.952 |
| 216 | 1-18 | 0.974 | 0.820 |
| 217 | 1-18 | 0.974 | 0.820 |
| 218 | 1-21 | 0.937 | 0.819 |
| 219 | 1-31 | 0.914 | 0.554 |
| 224 | 1-21 | 0.981 | 0.945 |
| 225 | 1-25 | 0.938 | 0.890 |
| 227 | 1-22 | 0.965 | 0.891 |
| 230 | 1-23 | 0.884 | 0.746 |
| 231 | 1-14 | 0.885 | 0.675 |
| 232 | 1-20 | 0.930 | 0.729 |

[0454] TABLE 6

| SEQ ID | SEQ ID | SEQ ID | SEQ ID | | |
|---|---|---|---|---|---|
| NO: of full- | NO: of | NO: of | NO: of | Priority docket | |
| length | full-length | contig | contig | number_corresponding | SEQ ID NO: |
| nucleotide | peptide | nucleotide | peptide | SEQ ID NO: in priority | in U.S.S.N. |
| sequence | sequence | sequence | sequence | application | 09/491,404 |
| 1 | 237 | 473 | 709 | 785CIP2B_1 | 10 |
| 2 | 238 | 474 | 710 | 785CIP2B_2 | 449 |
| 3 | 239 | 475 | 711 | 785CIP2B_3 | 1376 |
| 4 | 240 | 476 | 712 | 785CIP2B_4 | 1425 |
| 5 | 241 | 477 | 713 | 785CIP2B_5 | 1472 |
| 6 | 242 | 478 | 714 | 785CIP2B_6 | 1503 |
| 7 | 243 | 479 | 715 | 785CIP2B_7 | 1513 |
| 8 | 244 | 480 | 716 | 785CIP2B_8 | 1518 |
| 9 | 245 | 481 | 717 | 785CIP2B_9 | 1525 |
| 10 | 246 | 482 | 718 | 785CIP2B_10 | 1533 |
| 11 | 247 | 483 | 719 | 785CIP2B_11 | 1537 |
| 12 | 248 | 484 | 720 | 785CIP2B_12 | 1542 |
| 13 | 249 | 485 | 721 | 785CIP2B_13 | 1549 |
| 14 | 250 | 486 | 722 | 785CIP2B_14 | 1560 |
| 15 | 251 | 487 | 723 | 785CIP2B_15 | 1715 |
| 16 | 252 | 488 | 724 | 785CIP2B_16 | 1731 |
| 17 | 253 | 489 | 725 | 785CIP2B_17 | 1757 |
| 18 | 254 | 490 | 726 | 785CIP2B_18 | 1791 |
| 19 | 255 | 491 | 727 | 785CIP2B_19 | 1809 |
| 20 | 256 | 492 | 728 | 785CIP2B_20 | 1818 |
| 21 | 257 | 493 | 729 | 785CIP2B_21 | 1857 |
| 22 | 258 | 494 | 730 | 785CIP2B_22 | 1869 |
| 23 | 259 | 495 | 731 | 785CIP2B_23 | 1905 |
| 24 | 260 | 496 | 732 | 785CIP2B_24 | 1910 |
| 25 | 261 | 497 | 733 | 785CIP2B_25 | 1917 |
| 26 | 262 | 498 | 734 | 785CIP2B_26 | 1924 |
| 27 | 263 | 499 | 735 | 785CIP2B_27 | 1937 |
| 28 | 264 | 500 | 736 | 785CIP2B_28 | 1965 |
| 29 | 265 | 501 | 737 | 785CIP2B_29 | 2033 |
| 30 | 266 | 502 | 738 | 785CIP2B_30 | 2035 |
| 31 | 267 | 503 | 739 | 785CIP2B_31 | 2194 |
| 32 | 268 | 504 | 740 | 785CIP2B_32 | 2195 |
| 33 | 269 | 505 | 741 | 785CIP2B_33 | 2197 |
| 34 | 270 | 506 | 742 | 785CIP2B_34 | 2199 |
| 35 | 271 | 507 | 743 | 785CIP2B_35 | 2201 |
| 36 | 272 | 508 | 744 | 785CIP2B_36 | 2201 |
| 37 | 273 | 509 | 745 | 785CIP2B_37 | 2253 |
| 38 | 274 | 510 | 746 | 785CIP2B_38 | 2257 |
| 39 | 275 | 511 | 747 | 785CIP2B_39 | 2264 |
| 40 | 276 | 512 | 748 | 785CIP2B_40 | 2264 |
| 41 | 277 | 513 | 749 | 785CIP2B_41 | 2266 |
| 42 | 278 | 514 | 750 | 785CIP2B_42 | 2272 |
| 43 | 279 | 515 | 751 | 785CIP2B_43 | 2272 |
| 44 | 280 | 516 | 752 | 785CIP2B_44 | 2274 |
| 45 | 281 | 517 | 753 | 785CIP2B_45 | 2283 |
| 46 | 282 | 518 | 754 | 785CIP2B_46 | 2285 |
| 47 | 283 | 519 | 755 | 785CIP2B_47 | 2289 |
| 48 | 284 | 520 | 756 | 785CIP2B_48 | 2294 |
| 49 | 285 | 521 | 757 | 785CIP2B_49 | 2295 |
| 50 | 286 | 522 | 758 | 785CIP2B_50 | 2297 |
| 51 | 287 | 523 | 759 | 785CIP2B_51 | 2301 |
| 52 | 288 | 524 | 760 | 785CIP2B_52 | 2312 |
| 53 | 289 | 525 | 761 | 785CIP2B_53 | 2313 |
| 54 | 290 | 526 | 762 | 785CIP2B_54 | 2324 |
| 55 | 291 | 527 | 763 | 785CIP2B_55 | 2337 |
| 56 | 292 | 528 | 764 | 785CIP2B_56 | 2338 |
| 57 | 293 | 529 | 765 | 785CIP2B_57 | 2345 |
| 58 | 294 | 530 | 766 | 785CIP2B_58 | 2359 |
| 59 | 295 | 531 | 767 | 785CIP2B_59 | 2361 |
| 60 | 296 | 532 | 768 | 785CIP2B_60 | 2369 |
| 61 | 297 | 533 | 769 | 785CIP2B_61 | 2379 |
| 62 | 298 | 534 | 770 | 785CIP2B_62 | 2382 |
| 63 | 299 | 535 | 771 | 785CIP2B_63 | 2389 |
| 64 | 300 | 536 | 772 | 785CIP2B_65 | 2400 |
| 65 | 301 | 537 | 773 | 785CIP2B_66 | 2411 |
| 66 | 302 | 538 | 774 | 785CIP2B_67 | 2422 |
| 67 | 303 | 539 | 775 | 785CIP2B_68 | 2425 |
| 68 | 304 | 540 | 776 | 785CIP2B_69 | 2426 |
| 69 | 305 | 541 | 777 | 785CIP2B_70 | 2428 |
| 70 | 306 | 542 | 778 | 785CIP2B_71 | 2431 |
| 71 | 307 | 543 | 779 | 785CIP2B_72 | 2440 |
| 72 | 308 | 544 | 780 | 785CIP2B_73 | 2443 |
| 73 | 309 | 545 | 781 | 785CIP2B_74 | 2451 |
| 74 | 310 | 546 | 782 | 785CIP2B_75 | 2458 |
| 75 | 311 | 547 | 783 | 785CIP2B_76 | 2462 |
| 76 | 312 | 548 | 784 | 785CIP2B_77 | 2470 |
| 77 | 313 | 549 | 785 | 785CIP2B_78 | 2487 |
| 78 | 314 | 550 | 786 | 785CIP2B_79 | 2497 |
| 79 | 315 | 551 | 787 | 785CIP2B_80 | 2504 |
| 80 | 316 | 552 | 788 | 785CIP2B_81 | 2510 |
| 81 | 317 | 553 | 789 | 785CIP2B_82 | 2513 |
| 82 | 318 | 554 | 790 | 785CIP2B_83 | 2519 |
| 83 | 319 | 555 | 791 | 785CIP2B_84 | 2520 |
| 84 | 320 | 556 | 792 | 785CIP2B_85 | 2524 |
| 85 | 321 | 557 | 793 | 785CIP2B_86 | 2528 |
| 86 | 322 | 558 | 794 | 785CIP2B_87 | 2531 |
| 87 | 323 | 559 | 795 | 785CIP2B_88 | 2558 |
| 88 | 324 | 560 | 796 | 785CIP2B_89 | 2567 |
| 89 | 325 | 561 | 797 | 785CIP2B_90 | 2584 |
| 90 | 326 | 562 | 798 | 785CIP2B_91 | 2588 |
| 91 | 327 | 563 | 799 | 785CIP2B_92 | 2594 |
| 92 | 328 | 564 | 800 | 785CIP2B_93 | 2596 |
| 93 | 329 | 565 | 801 | 785CIP2B_94 | 2599 |
| 94 | 330 | 566 | 802 | 785CIP2B_95 | 2601 |
| 95 | 331 | 567 | 803 | 785CIP2B_96 | 2603 |
| 96 | 332 | 568 | 804 | 785CIP2B_97 | 2604 |
| 97 | 333 | 569 | 805 | 785CIP2B_98 | 2604 |
| 98 | 334 | 570 | 806 | 785CIP2B_99 | 2604 |
| 99 | 335 | 571 | 807 | 785CIP2B_100 | 2604 |
| 100 | 336 | 572 | 808 | 785CIP2B_101 | 2610 |
| 101 | 337 | 573 | 809 | 785CIP2B_102 | 2612 |
| 102 | 338 | 574 | 810 | 785CIP2B_103 | 2626 |
| 103 | 339 | 575 | 811 | 785CIP2B_104 | 2629 |
| 104 | 340 | 576 | 812 | 785CIP2B_105 | 2630 |
| 105 | 341 | 577 | 813 | 785CIP2B_106 | 2631 |
| 106 | 342 | 578 | 814 | 785CIP2B_107 | 2639 |
| 107 | 343 | 579 | 815 | 785CIP2B_108 | 2651 |
| 108 | 344 | 580 | 816 | 785CIP2B_109 | 2652 |
| 109 | 345 | 581 | 817 | 785CIP2B_110 | 2661 |
| 110 | 346 | 582 | 818 | 785CIP2B_111 | 2662 |
| 111 | 347 | 583 | 819 | 785CIP2B_112 | 2677 |
| 112 | 348 | 584 | 820 | 785CIP2B_113 | 2677 |
| 113 | 349 | 585 | 821 | 785CIP2B_114 | 2680 |
| 114 | 350 | 586 | 822 | 785CIP2B_115 | 2688 |
| 115 | 351 | 587 | 823 | 785CIP2B_116 | 2693 |
| 116 | 352 | 588 | 824 | 785CIP2B_117 | 2716 |
| 117 | 353 | 589 | 825 | 785CIP2B_118 | 2720 |
| 118 | 354 | 590 | 826 | 785CIP2B_119 | 2721 |
| 119 | 355 | 591 | 827 | 785CIP2B_120 | 2724 |
| 120 | 356 | 592 | 828 | 785CIP2B_121 | 2725 |
| 121 | 357 | 593 | 829 | 785CIP2B_122 | 2727 |
| 122 | 358 | 594 | 830 | 785CIP2B_123 | 2739 |
| 123 | 359 | 595 | 831 | 785CIP2B_124 | 2740 |
| 124 | 360 | 596 | 832 | 785CIP2B_125 | 2747 |
| 125 | 361 | 597 | 833 | 785CIP2B_126 | 2748 |
| 126 | 362 | 598 | 834 | 785CIP2B_127 | 2752 |
| 127 | 363 | 599 | 835 | 785CIP2B_128 | 2755 |
| 128 | 364 | 600 | 836 | 785CIP2B_129 | 2764 |
| 129 | 365 | 601 | 837 | 785CIP2B_130 | 2773 |
| 130 | 366 | 602 | 838 | 785CIP2B_131 | 2778 |
| 131 | 367 | 603 | 839 | 785CIP2B_132 | 2779 |
| 132 | 368 | 604 | 840 | 785CIP2B_133 | 2780 |
| 133 | 369 | 605 | 841 | 785CIP2B_134 | 2781 |
| 134 | 370 | 606 | 842 | 785CIP2B_135 | 2786 |
| 135 | 371 | 607 | 843 | 785CIP2B_136 | 2790 |
| 136 | 372 | 608 | 844 | 785CIP2B_137 | 2791 |
| 137 | 373 | 609 | 845 | 785CIP2B_138 | 2795 |
| 138 | 374 | 610 | 846 | 785CIP2B_139 | 2801 |
| 139 | 375 | 611 | 847 | 785CIP2B_140 | 2802 |
| 140 | 376 | 612 | 848 | 785CIP2B_141 | 2804 |
| 141 | 377 | 613 | 849 | 785CIP2B_142 | 2811 |
| 142 | 378 | 614 | 850 | 785CIP2B_143 | 2820 |
| 143 | 379 | 615 | 851 | 785CIP2B_144 | 2825 |
| 144 | 380 | 616 | 852 | 785CIP2B_145 | 2836 |
| 145 | 381 | 617 | 853 | 785CIP2B_146 | 2841 |
| 146 | 382 | 618 | 854 | 785CIP2B_147 | 2843 |
| 147 | 383 | 619 | 855 | 785CIP2B_148 | 2844 |
| 148 | 384 | 620 | 856 | 785CIP2B_149 | 2845 |
| 149 | 385 | 621 | 857 | 785CIP2B_150 | 2849 |
| 150 | 386 | 622 | 858 | 785CIP2B_151 | 2850 |
| 151 | 387 | 623 | 859 | 785CIP2B_152 | 2866 |
| 152 | 388 | 624 | 860 | 785CIP2B_153 | 2873 |
| 153 | 389 | 625 | 861 | 785CIP2B_154 | 2874 |
| 154 | 390 | 626 | 862 | 785CIP2B_155 | 2878 |
| 155 | 391 | 627 | 863 | 785CIP2B_156 | 2882 |
| 156 | 392 | 628 | 864 | 785CIP2B_157 | 2888 |
| 157 | 393 | 629 | 865 | 785CIP2B_158 | 2894 |
| 158 | 394 | 630 | 866 | 785CIP2B_159 | 2899 |
| 159 | 395 | 631 | 867 | 785CIP2B_160 | 2899 |
| 160 | 396 | 632 | 868 | 785CIP2B_161 | 2903 |
| 161 | 397 | 633 | 869 | 785CIP2B_162 | 2905 |
| 162 | 398 | 634 | 870 | 785CIP2B_163 | 2913 |
| 163 | 399 | 635 | 871 | 785CIP2B_164 | 2920 |
| 164 | 400 | 636 | 872 | 785CIP2B_165 | 2927 |
| 165 | 401 | 637 | 873 | 785CIP2B_166 | 2938 |
| 166 | 402 | 638 | 874 | 785CIP2B_167 | 2952 |
| 167 | 403 | 639 | 875 | 785CIP2B_168 | 2954 |
| 168 | 404 | 640 | 876 | 785CIP2B_169 | 2954 |
| 169 | 405 | 641 | 877 | 785CIP2B_170 | 2958 |
| 170 | 406 | 642 | 878 | 785CIP2B_171 | 2958 |
| 171 | 407 | 643 | 879 | 785CIP2B_172 | 2958 |
| 172 | 408 | 644 | 880 | 785CIP2B_173 | 2959 |
| 173 | 409 | 645 | 881 | 785CIP2B_174 | 2961 |
| 174 | 410 | 646 | 882 | 785CIP2B_175 | 2978 |
| 175 | 411 | 647 | 883 | 785CIP2B_176 | 2981 |
| 176 | 412 | 648 | 884 | 785CIP2B_177 | 2996 |
| 177 | 413 | 649 | 885 | 785CIP2B_178 | 2997 |
| 178 | 414 | 650 | 886 | 785CIP2B_179 | 3001 |
| 179 | 415 | 651 | 887 | 785CIP2B_180 | 3006 |
| 180 | 416 | 652 | 888 | 785CIP2B_181 | 3007 |
| 181 | 417 | 653 | 889 | 785CIP2B_182 | 3010 |
| 182 | 418 | 654 | 890 | 785CIP2B_183 | 3034 |
| 183 | 419 | 655 | 891 | 785CIP2B_184 | 3058 |
| 184 | 420 | 656 | 892 | 785CIP2B_185 | 3060 |
| 185 | 421 | 657 | 893 | 785CIP2B_186 | 3061 |
| 186 | 422 | 658 | 894 | 785CIP2B_187 | 3078 |
| 187 | 423 | 659 | 895 | 785CIP2B_188 | 3081 |
| 188 | 424 | 660 | 896 | 785CIP2B_189 | 3083 |
| 189 | 425 | 661 | 897 | 785CIP2B_190 | 3086 |
| 190 | 426 | 662 | 898 | 785CIP2B_191 | 3090 |
| 191 | 427 | 663 | 899 | 785CIP2B_193 | 3102 |
| 192 | 428 | 664 | 900 | 785CIP2B_194 | 3110 |
| 193 | 429 | 665 | 901 | 785CIP2B_195 | 3117 |
| 194 | 430 | 666 | 902 | 785CIP2B_196 | 3118 |
| 195 | 431 | 667 | 903 | 785CIP2B_197 | 3121 |
| 196 | 432 | 668 | 904 | 785CIP2B_198 | 3124 |
| 197 | 433 | 669 | 905 | 785CIP2B_199 | 3131 |
| 198 | 434 | 670 | 906 | 785CIP2B_200 | 3132 |
| 199 | 435 | 671 | 907 | 785CIP2B_201 | 3135 |
| 200 | 436 | 672 | 908 | 785CIP2B_202 | 3143 |
| 201 | 437 | 673 | 909 | 785CIP2B_203 | 3145 |
| 202 | 438 | 674 | 910 | 785CIP2B_204 | 3156 |
| 203 | 439 | 675 | 911 | 785CIP2B_205 | 3160 |
| 204 | 440 | 676 | 912 | 785CIP2B_206 | 3163 |
| 205 | 441 | 677 | 913 | 785CIP2B_207 | 3167 |
| 206 | 442 | 678 | 914 | 785CIP2B_208 | 3170 |
| 207 | 443 | 679 | 915 | 785CIP2B_209 | 3174 |
| 208 | 444 | 680 | 916 | 785CIP2B_210 | 3176 |
| 209 | 445 | 681 | 917 | 785CIP2B_211 | 3178 |
| 210 | 446 | 682 | 918 | 785CIP2B_212 | 3180 |
| 211 | 447 | 683 | 919 | 785CIP2B_213 | 3791 |
| 212 | 448 | 684 | 920 | 785CIP2B_215 | 3793 |
| 213 | 449 | 685 | 921 | 785CIP2B_216 | 3793 |
| 214 | 450 | 686 | 922 | 785CIP2B_217 | 3794 |
| 215 | 451 | 687 | 923 | 785CIP2B_218 | 3795 |
| 216 | 452 | 688 | 924 | 785CIP2B_219 | 3796 |
| 217 | 453 | 689 | 925 | 785CIP2B_220 | 3796 |
| 218 | 454 | 690 | 926 | 785CIP2C_1 | 145 |
| 219 | 455 | 691 | 927 | 785CIP2C_3 | 639 |
| 220 | 456 | 692 | 928 | 785CIP2C_4 | 652 |
| 221 | 457 | 693 | 929 | 785CIP2C_5 | 753 |
| 222 | 458 | 694 | 930 | 785CIP2C_6 | 754 |
| 223 | 459 | 695 | 931 | 785CIP2C_7 | 1258 |
| 224 | 460 | 696 | 932 | 785CIP2C_8 | 1316 |
| 225 | 461 | 697 | 933 | 785CIP2C_9 | 1343 |
| 226 | 462 | 698 | 934 | 785CIP2C_11 | 1499 |
| 227 | 463 | 699 | 935 | 785CIP2C_12 | 1659 |
| 228 | 464 | 700 | 936 | 785CIP2C_13 | 2024 |
| 229 | 465 | 701 | 937 | 785CIP2C_15 | 2114 |
| 230 | 466 | 702 | 938 | 785CIP2C_16 | 2119 |
| 231 | 467 | 703 | 939 | 785CIP2C_17 | 2126 |
| 232 | 468 | 704 | 940 | 785CIP2C_19 | 2137 |
| 233 | 469 | 705 | 941 | 785CIP2C_20 | 2143 |
| 234 | 470 | 706 | 942 | 785CIP2C_21 | 2145 |
| 235 | 471 | 707 | 943 | 785CIP2C_22 | 2853 |
| 236 | 472 | 708 | 944 | 785CIP2C_24 | 3076 |

[0455] TABLE 7

| | | | |
|---|---|---|---|
| | Predicted | | Amino acid segment containing signal peptide |
| | beginning | Predicted end | (A = Alanine C = Cysteine, D = Aspartic Acid, |
| | nucleotide | nucleotide | E = Glutamic Acid, F = Phenylalanine, G = Glycine, |
| | location | location | H = Histidine, I = Isoleucine, K = Lysine, L = Leucine, |
| | corresponding | corresponding | M = Methionine, N = Asparagine, P= Proline, |
| | to first amino | to first amino | Q = Glutamine, R = Arginine, S = Serine, T = Threonine, |
| SEQ | acid residue | acid residue of | V = Valine, W= Tryptophan, Y = Tyrosine, |
| ID | of amino acid | amino acid | X = Unknown, * = Stop codon, / = possible nucleotide |
| NO | sequence | sequence | deletion, \ = possible nucleotide insertion |

| | | | |
|---|---|---|---|
| 709 | 465 | 301 | MGKSLASQFPITLIFSAFSSTFCLLDGLFISCPCTSTELPKVNSLLSRPESATT* |
| 710 | 1181 | 1345 | MLALSSSFLVLSYLLTFRWCGSVGFILANCFNMGIRITQSLCFIHRYYRRSPHRP |
| | | | L |
| 711 | 186 | 701 | MKVLWAALLVTFLAGCQAKVEQAVETEPEPELRQQTEWQSGQRWELALGRFWDYL |
| | | | RWVQTLSEQVQEELLSSQVTQELRLMDETMKELKAYKSELEEQLTPVAEETRARL |
| | | | SKELQAAQARLGADMEDVCGRLGAVTAVMVQGHARPEQPRSCGWRVRLPPAQAGV |
| | | | SGSLR* |
| 712 | 3917 | 4081 | MFRRLTFAQLLFATVLGIAGGVYIFQPVFEQYAKDQKELKEKMQLVQESEEKKS* |
| 713 | 26 | 1123 | MSLLGFLLSRLGLLLKVLLDWPVEVLYGAAALNGLFGGFSAFWSGVMALGSLGSS |
| | | | EGRRSVRLILIDLMLGLAGFCGSMASGHLFKQMAGHSGQGLILTACSVSCASFAL |
| | | | LYSLLVLKVPESVAKPSQELPAVDTVSGTVGTYRTLDPDQLDQQYAVGHPPSPGK |
| | | | AKPHKTTIALLFVGAIIYDLAVVGTVDVIPLFVLREPLGWNQVQVGYGMAAGYTI |
| | | | FITSFLGVLVFSRCFRDTTMIMIGMVSFGSGALLLAFVKETYMFYIARAVMLFAL |
| | | | IPVTTRSAMSKILKGSSYGKVFVILQLSLALTGVVTSTLYNKIYQLTMDMFGGSC |
| | | | FALSSFLSFLAIIPISIVAYKQVPLSPYGDIIEK* |
| 714 | 39 | 431 | MFLFLFFLVAILPVNTEGGEIIWGTESKPHSRPYMAFIKFYDSNSEPHHCGGFLV |
| | | | AKDIVMTAAHCNGRNIKVTLGAHNIKKQENTQVISVVKAKPHENYDRDSHFNDIM |
| | | | LLKLERKAQLNGCCEDYCPS* |
| 715 | 970 | 1755 | MLVLLVLRVSLAALVKMELLVRWAPVACLVREVALEPLALLVLVEMMVLLVLPGP |
| | | | LVPPAPLVLLASLVLLVLRVKLVPKGPEALKVPRVCVVSLAPLALLVLLALLETL |
| | | | VLRESLVLKVPMVLLVLLVLLASLVPEAPLDPRAPAALLVPRVTAVNLVLLAAKE |
| | | | TLVLRESLALLVFKDPLALLERKESEELEVNPDPLACPDPLASVVDLVAVVSLAQ |
| | | | [sequence omitted] |
| 716 | 3060 | 2899 | [sequence omitted] |
| 717 | 70 | 618 | MGWTMRLVTAALLLGLMMVVTGDEDENSPCAHEALLDEDTLFCQGLEVFYPELGN |
| | | | IGCKVVPDCNNYRQKITSWMEPIVKFPGAVDGATYILVMVDPDAPSRAEPRQRFW |
| | | | RHWLVTDIKGADLKEGKIQGQELSALPGSLPHRHTVAFHRYQVLCLSSGREKSSL |
| | | | SFPRKTKLEALGKWTDF* |
| 718 | 79 | 342 | MRRSFWTVMRTAWRCSCSSVDRALSHQAGLQGQCLSACLLGNLGYPPFISPPAQV |
| | | | LCAARASCHLGSLMAHFETLVHSKDWSCVILK* |
| 719 | 382 | 1326 | MLFWVLGLLILCGFLWTRKGKLKIEDITDKYIFITGCDSGFGNLAARTFDKKGFH |
| | | | VIAACLTESGSTALKAETSERLRTVLLDVTDPENVKRTAQWVKNQVGEKGLWGLI |
| | | | NNAGVPGVLAPTDWLTLEDYREPIEVNLFGLISVTLNMLPLVKKAQGRVINVSSV |
| | | | GGRLAIVGGGYTPSKYAVEGFNDSLRRDMKAFGVHVSCIEPGLFKTNLADPVKVI |
| | | | EKKLAIWEQLSPDIKQQYGEGYIEKSLDKLKGNKSYVNMDLSPVVECMDHALTSL |
| | | | FPKTHYAAGKDAKIFWIPLSHMPAALQDFLLLKQKARAG* |
| 720 | 875 | 516 | MSVPTMAWMMLLLGLLAYGSGVESQTVVTQEPSLSVSPGGTVTLTCGLTSGSVST |
| | | | SFYPSWYQQTPGQAPRTLIYSTNTRSSGVPGRFSGSILGSKAALTITGAQADDES |
| | | | DYYCVLICR* |
| 721 | 431 | 3643 | MNCDVLWCVLLLVCMSLFSAVGHGLWIWRYQEKKSLFYVPKSDGSSLSPVTAAVY |
| | | | SFLTMIIVLQVLIPISLYVSIEIVKACQVYFINQDMQLYDEETDSQLQCRALNIT |
| | | | EDLGQIQYIFSDKTGTLTENKMVFRRCTVSGVEYSHDANAQRLARYQEADSEEEE |
| | | | VVPRGGSVSQRGSIGSHQSVRVVHRTQSTKSHRRTGSRAEAKRASMLSKHTAFSS |
| | | | PMEKDITPDPKLLEKVSECDKSLAVARHQEHLLAHLSPELSDVFDFLIALTICNT |
| | | | VVVTSPDQPRTKVRVRFELKSPVKTIEDFLRRFTPSCLTSGCSSIGSLAANKSSH |
| | | | KLGSSFPSTPSSDGMLLRLEERLGQPTSAIASNGYSSQADNWASELAQEQESERE |
| | | | LRYEAESPDEAALVYAARAYNCVLVERLHDQVSVELPHLGRLTFELLHTLGFDSV |
| | | | RKRMSVVIRHPLTDEINVYTKGADSVVMDLLQPCSSVDARGRHQKKIRSKTQNYL |
| | | | NVYAAEGLRTLCIAKRVLSKEEYACWLQSHLEAESSLENSEELLFQSAIRLETNL |
| | | | HLLGATGIEDRLQDGVPETISKLRQAGLQIWVLTGDKQETAVNIAYACKILDHDE |
| | | | EVITLNATSQEACAALLDQCLCYVQSRGPQRAPEKTKGKVSMRFSSLCPPSTSTA |
| | | | SGRRPSLVIDGRSMAYALEKNLEDKFLFLAKQCRSVLCCRSTPLQKSMVVKLVRS |
| | | | KLKAMTLAIGDGANDVSMIQVADVGVGISGQEGMQAVMASDFAVPKFRYLERLLI |
| | | | LHGHWCYSRLANMVLYFFYKNTMFVGLLFWFQFFCGFSASTMIDQWYLIFFNLLF |
| | | | SSLPPLVTGVLDRDVPANVLLTNPQLYKSGQNMEEYRPRTFWFNMADAAFQSLVC |
| | | | FSIPYLAYYDSNVDLFTWGTPIVTIALLTFLLHLGIETKTWTWLNWITCGFSVLL |
| | | | FFTVALIYNASCATCYPPSNPYWTMQALLGDPVFYLTCLMTPVAALLPRLFFRSL |
| | | | QGRVFPTQLQLARQLTRKSPRRCSAPKETFAQGRPXEGLGNRGTHQGGQSRPLCP |
| | | | CPSLLGTHSSRSAPWRPAGSPAQWT* |
| 722 | 3616 | 1673 | MLWVTGPVLAVILIILIVIAILLFKRKRTHSPSSKDEQSIGLKDSLLAHSSDPVE |
| | | | MRRLNYQTPGMRDHPPIPITDLADNIERLKANDGLKFSQEYESIDPGQQFTWENS |
| | | | NLEVNKPKNRYANVIAYDHSRVILTSIDGVPGSDYINANYIDGYRKQNAYIATQG |
| | | | PLPETMGDFWRMVWEQRTATVVMMTRLEEKSRVKCDQYWPARGTETCGLIQVTLL |
| | | | DTVELATYTVRTFALHKSGSSEKRELRQFQFMAWPDHGVPEYPTPILAFLRRVKA |
| | | | CNPLDAGPMVVHCSAGVGRTGCFIVIDAMLERMKHEKTVDIYGHVTCMRSQRNYM |
| | | | VQTEDQYVFIHEALLEAATCGHTEVPARNLYAHIQKLGQVPPGESVTAMELEFKL |
| | | | LASSKAHTSRFISANLPCNKFKNRLVNIMPYELTRVCLQPIRGVEGSDYINASFL |
| | | | DGYRQQKAYIATQGPLAESTEDFWRMLWEHNSTIIVMLTKLREMGREKCHQYWPA |
| | | | ERSARYQYFVVDPMAEYNMPQYILREFKVTDARDGQSRTIRQFQFTDWPEQGVPK |
| | | | TGEGFIDFIGQVHKTKEQFGQDGPITVHCSAGVGRTGVFITLSIVLERMRYEGVV |
| | | | DMFQTVKTLRTQRPAMVQTEDQYQLCYRAALEYLGSFDHYAT* |
| 723 | 484 | 765 | MIWIYFAFIFQRLHLIPGKSSARQVSGFSLLSFNPSNTIFVKLDWWCFIQLIYSA |
| | | | YLFEKRLLEJDDVFVPVILKVVGARIEFHSGIGFGSGL* |
| 724 | 846 | 983 | MLIAVIACICYLSLLHSYDILFGHFSVLSQGLDKHCLTLFLSLGG* |
| 725 | 154 | 513 | MVIINCSPRFWFLFPFTIQHTCKCPLGVRYHTRHLEQIAANKKHCPYPYEVHYNS |
| | | | SYWRAGIILHTLHAYLTSYPHYYSFFFFFFGKGVPFCPZGGGAGKGSGLMGSHRG |
| | | | TKPKSFLKKK |
| 726 | 709 | 566 | [sequence omitted] |
| 727 | 175 | 342 | MYMNTCLYLHVYVLTCSGCNVDMCSRLFLSTKLKAHVQIVLYWVFLWSRGNNFLT |
| | | | * |
| 728 | 109 | 264 | MVILDVLELYHMWFLGILYDAIFYCFVHAINADKFFGLKLTKSATVSQNSQ* |
| 729 | 56 | 220 | MYDFLLLLSFIFIVASYWSFLSTIFLDVVCSILHCPVKPQTLLKSCLHVDCKST* |
| 730 | 735 | 1235 | MVGLGGMSQLLLASLLPPVPQGSPTRRKLPASLLVSTALISPVCVRGWMWQNLQN |
| | | | RIHGSHTSARRVPSLPGAGQVGVRWEAGPACRTQPSPQNLAPRPHPSAAQLIENA |
| | | | ALRSAMSGERLFPEGQEHLGPLVAPRVPMGGALCPPLPSLSCAICKVGAAREAGG |
| | | | R* |
| 731 | 109 | 303 | MKPYCMYPFLSGLLSSLLFWVESLMLLCVQMVLFLMLCVLDYRIYCIKIYVSIIL |
| | | | LMSIWIISI* |
| 732 | 165 | 359 | MCYFYNTIILTLQGSLMFLLFSVVTLYLFSHSHPTPISIFSDVFNMYPWIYMYSY |
| | | | MVFSVNLYK* |
| 733 | 7 | 279 | MAAAPGLLVWLLVLRLPWRVPGQLDPSTGRRFSEHKLCADDECSMLMYRGEALED |
| | | | FTGPDCRFVNFKKGDPVYVYYKLARGWPEVWAGSK* |
| 734 | 81 | 275 | MPGYVPLLLLLLLLRCSQRGGGVNFGEKDAKVPGTWRDGVRVPGEGASWDSDRAS |
| | | | PERRYGIGE* |
| 735 | 207 | 419 | MKFLLMSLPYRHLFCITQAILSEIAEGIRNDPFKFYLYSVLALFLHYYMYVFVSR |
| | | | FSIYYLKLLRIFKFS* |
| 736 | 233 | 457 | MRQIAVFQRFMFPFLLPWLSCIFSSSQNSIYYVSTFIKCLALKSIIKRQRSEINS |
| | | | GFLAIYHALRNQVTRCGGL* |
| 737 | 39 | 251 | MPRRTRGGLWLCNAHKSCQKYLSSLKISTLLSPLLVLPFYTPSLKGWGIFVLRFY |
| | | | FMVIIADCNLFKIII* |
| 738 | 155 | 313 | [sequence omitted] |
| 739 | 60 | 272 | MERGAGAKLLPLLLLLRATGFTCAQADGRNGYTAVIEVTSGGPWGDWAWPEMCPD |
| | | | GFFASGFS |
| 740 | 49 | 360 | MTQVERVIVFLTLSTLSLAKTTQPIFMDSYEGQEVNITCSHNNIVTNDYITWYQQ |
| | | | FPSQGPRFIIQGYQKKVTNEVAFLCIPADRKSITLNLPRVSLEDTGGK* |
| 741 | 47 | 325 | MTKLAQWLWGLAILGSTWVALTTGALGLELPLSCQEVLWPLPAYLLVSAGCYALG |
| | | | TVGYRVAT |
| 742 | 301 | 438 | MSVGLAGAVGRRCHLALAVLHDPLCHHGSLATICKQPEVCLFTIV* |
| 743 | 165 | 413 | MPFLLNQCGSLLYYLTLASTDLTLAVPICNSLAIIFTLIVGKALGEDIGCGKRAV |
| | | | AGMVLTVIGISLCITSSVSKTQGQQSTL* |
| 744 | 165 | 413 | MPFLLNQCGSLLYYLTLASTDLTLAVPICNSLATIFTLIVGKALGEDIGGKRAVA |
| | | | GMVLTVIGISLCITSSVSKTQGQQSTL* |
| 745 | 923 | 1618 | MALIYVMLLLLGAFLGAWPALCGRYKRWRKHGVFVLLTTATSVAIWVVWIVMYTY |
| | | | GNKQHNSPTWDDPTLAIALAANAWAFVLFYVIPEVSQVTKSSPEQSYQGDMYPTR |
| | | | GVGYETILKEQKGQSMFVENKAFSMDEPVAAKRPVSPYSGYNGQLLTSVYQPTEM |
| | | | ALMHKVPSEGAYDIILPRATANSQVMGSANSTLRAEDMYSAQSHQAATPPKDGKN |
| | | | SQVFRNPYVWD* |
| 746 | 14 | 370 | MVKTDAHLKNPPFAPFRVYTLTLSLLLKLSHYSCLWVKKDFKDSSFYNSNNNSNS |
| | | | NHCKSLLSTHYMPGAVISNLCLISCKVSSSPIKQTHGISMLQMKRLKHTLARLAP |
| | | | GTHGGSQN* |
| 747 | 103 | 1002 | MGTKAQVERKLLCLFILAILLCSLALGSVTVHSSEPEVRIPENNPVKLSCAYSGF |
| | | | FSSPRVEWKFDQGDTTRLVCYNNKITASYEDRVTFLPTGITFKSVTREDTGTYTC |
| | | | MVSEEGGNSYGEVKVKLIVLVPPSKPTVNIPSSATIGNRAVLTCSEQDGSPPSEY |
| | | | TWFKDGIVMPTNPKSTRAFSNSSYVLNPTTGELVFDPLSASDTGEYSCEARNGYG |
| | | | TPMTSNAVRMEAVERNVGVIVAAVLVTLILLGILVFGIWFAYSRGHFDRTKKGTS |
| | | | SKKVIYSQPSARSEGEFKQTSSFLV* |
| 748 | 103 | 1002 | MGTKAQVERKLLCLFILAILLCSLALGSVTVHSSEPEVRIPENNPVKLSCAYSGF |
| | | | SSPRVEWKFDQGDTTRLVCYNNKITASYEDRVTFLPTGITFKSVTREDTGTYTCM |
| | | | VSEEGGNSYGEVKVKLIVLVPPSKPTVNIPSSATIGNRAVLTCSEQDGSPPSEYT |
| | | | WFKDGIVMPTNPKSTRAFSNSSYVLNPTTGELVFDPLSASDTGEYSCEARNGYGT |
| | | | PMTSNAVRMEAVERNVGVIVAAVLVTLILLGILVFGIWFAYSRGHFDRTKKGTSS |
| | | | KKVIYSQPSARSEGEFKQTSSFLV* |
| 749 | 970 | 1263 | MPSSFFLLLRFFLRIDGVLIRMNDTRLYHEADKTYMLREYTSRESKISSLMHVPP |
| | | | SLFTEPNEISQYLPIKEAVCEKLFPERIDPNPADSQKSTQVE |
| 750 | 1207 | 887 | MYTRELLAWIQGLYTWELLAWIQHLNTWELLPWIRRLNSWILLVCPKLLHLWVFG |
| | | | KTMEIFVLVKDMMPFLYKKELCLVPEVISLLIFSHLDTSKELSIYGLTQLI* |
| 751 | 1207 | 887 | MYTRELLAWIQGLYTWELLAWIQHLNTWELLPWIRRLNSWILLVCPKLLHLWVFG |
| | | | KTMEIFVLVKDMMPFLYKKELCLVPEVISLLIFSHLDTSKELSIYGLTQLI* |
| 752 | 43 | 948 | MFSHLPFDCVLLLLLLLLTRSSEVEYRAEVGQNAYLPCFYTPAAPGNLVPVCWGK |
| | | | GACPVFECGNVVLRTDERDVNYWTSRYWLNGDFRKGDVSLTIENVTLADSGIYGC |
| | | | RIQIPGIMNDEKFNLKLVIKPAKVTPAPTLQRDFTAAFPRMLTTRGHGPAETQTL |
| | | | GSLPDINLTQISTLANELRDSRLANDLRDSGATIRIGIYIGAGICAGLALALIFG |
| | | | ALIFKWYSHSKEKIQNLSLISLANLPPSGLANAVAEGIRSEENIYTIEENVYEVE |
| | | | EPNEYYCYVSSRQQPSQPLGCRFAMP* |
| 753 | 2350 | 2180 | MGGVAFLLWLTVFSAWTRLSIFSRLSDLPSFCLPLAGTVSSSLPEGSGCSFSSST |
| | | | K* |
| 754 | 369 | 707 | MCHWQNSFLGQSFLTFGSILALLAGKACYPESESIRELFMWALELYSLPFYLFFK |
| | | | LSPLNLPGKLGLIETLSTCWGQKLDPVLETLQRVRSMASLIANFFVPFIQKKGQL |
| | | | IT* |
| 755 | 847 | 149 | MAWIPLFLGVLAYCTGSVASYELTQPPSVSVSPGQTASITCSGDNLGNKYVAWYQ |
| | | | QKAGQSPVLVIYQDDKRPSEIPERFSGSNSGNTATLTISGTQAMDEADYYCQAWD |
| | | | SSTAVMFGGGTKLTVLGQPKAAPSVTLFPPSSEELQANKATLVCLISDFYPGAVT |
| | | | VAWKADSSPVKAGVETTPSKQSNNKYAASSYLSLTPEQWKSHRSYSCQVTHEGST |
| | | | VEKTVAPTECS* |
| 756 | 1726 | 1869 | MGAGCTPVVLGAALWLWRWFSRWGLGGLCWRPCTCTPCHSASPGAGR* |
| 757 | 167 | 310 | MLGICLCSICVLRLCLEKSKIFPPPRTSDHSLEGSVTPVENAARSGM* |
| 758 | 335 | 778 | MSITRLFPALLECFVIVLCGYIAGRANVITSTQAKGLGNFVSRFALPALLFKNMV |
| | | | VLNFSNVDWAFLYSILIAKASVFFIVCVLTLLVASPDSRFSKAGLFPIFATQSND |
| | | | FALGYPIGKLIFIFQVFKKFNFNLFRHLLVTDSYSHI* |
| 759 | 102 | 419 | MWLGQAFWAWLSFMNRWHSKFLMVRSRGECGAQRQLLCVFVFRDSLREGMPRRNM |
| | | | VSSEAHGCLLRTAVFYATYPCTSYAKETKPSACLFPLLIIGKWMLWSFKN* |
| 760 | 27 | 371 | MSSWFLRAGHGLIWVLFFRIGQAAVGVSAGPGGSPKAHLGRVASQHPHGAESRAC |
| | | | LLARGLPKALSSMLAVDCRPRSGPLHRAAHIMAASLISKPVRGCLSEDDIPSPLS |
| | | | DSAY* |
| 761 | 428 | 685 | MGWDSKLLFLFTCLSCVTTCSVSTCFQAPLGSSSFAPSGIHGTLEFPVVRGAHKN |
| | | | FLPMGPMYLFPITAGQPLTLFVKTQSAGRN* |
| 762 | 293 | 3 | MCHVHCCWKFIVELLQCVIQGIRCLYFGNICNGTCFLESCFFGMSFQGANFLFFG |
| | | | NSHSSSFYCRRMSPFPRGEQVLHFICHSVCQCQCQCWCSGG* |
| 763 | 38 | 385 | MLLWVFLQLNYKIQAIPTYETVMTFFKSFPENCCFLDRDIGQSLRPLFLCLRLHG |
| | | | ITKGKDXEVLRHLNFFPESWLDQVTVNHYHALENGGDMVHLKDLNTQAVRFGLLF |
| | | | NQENTT |
| 764 | 508 | 1374 | MLAMGALAGFWILCLLTYGYLSWGQALEEEEEGALLAQAGEKLEPSTTSTSQPHL |
| | | | IFILADDQGFRDVGYHGSEIKTPTLDKLAAEGVKLENYYVQPICTPSRSQFITGK |
| | | | YQIHTGLQHSIIRPTQPNCLPLDNATLPQKLKEVGYSTHMVGKWHLGFYRKECMP |
| | | | TRRGFDTFFGSLLGSGDYYTHYKCDSPGMCGYDLZYENDNAAWDYDNGIYSTQMY |
| | | | TQRVQQILASHNPTKPIFLYIAYQAVHSPLQAPGRYFEHYRSIININRRRYAAML |
| | | | SCLDEAINNVTLALK |
| 765 | 660 | 875 | MRSYKPNPLLFPKLQILIFLTSYLIFTLRYLPGVFNILFKTVLLVFFLQDYSLLI |
| | | | SANSSSFQVLSVKTYN* |
| 766 | 316 | 456 | MDLYVVIFWLVYIFSTYIITYIKGNVGLCFQILFQLSFERRPKSVR* |
| 767 | 231 | 584 | MSFPIHLRFFSLFFLHWLLLSGFSSLLPWASAFVQYSRCPEHTPSLCPGGANNPL |
| | | | LQAPTQMLPPLGCLLCALPASPSPYLCWHLLYHAFRNLLIPLISGAPCGSGIPKF |
| | | | SKCLSVS* |
| 768 | 135 | 305 | MKNLLMVHLWGICTLYLEFSAVSAISFLNHISVKTYFPNSSSFYRATPMVLDFIL |
| | | | H* |
| 769 | 231 | 401 | MLGWQIWRLRPQLLSFHTQDRCHWSITSQCSKPESQESFLSTIHLLEGAQEGTPT |
| | | | E* |
| 770 | 141 | 314 | MRETGILLCFLSALNYITLVTSQKLILSKKMHVNHYLPKKTISKFLYFVKVFHDL |
| | | | VL* |
| 771 | 55 | 276 | MKQLIYWFSLFFCCSCCHLNRHGNRLHTTEIFPSLFHLVCCADPLPWMPAHSFGS |
| | | | PFWSLFSTYPGRNSRGCQ* |
| 772 | 139 | 354 | MLLFSLNFFFWKIVMFHKNVIFILTCNGFIIVTFKWIDKFILNISILISNTVNVN |
| | | | SHNPHKQKFFGDLSNF* |
| 773 | 269 | 457 | MQLKFSQLTTSSLSFSSALWLLAFSRVFLLADSNLFVKPSSDLGSDTCSADFCDF |
| | | | RKLSFFR* |
| 774 | 96 | 1385 | MCPGALWVALPLLSLLAGSLQGKPLQSWGRGSAGGNAHSPLGVPGGGLPEHTFNL |
| | | | KMFLENVKVDFLRSLNLSGVPSQDKTRVEPPQYMIDLYNRYTSDKSTTPASNIVR |
| | | | SFSMEDAISITATEDFPFQKHILLFNISIPRHEQITRAELRLYVSCQNHVDPSHD |
| | | | LKGSVVIYDVLDGTDAWDSATETKTPLVSQDIQDEGWETLEVSSAVKRWVRSDST |
| | | | KSKNKLEVTVESHRKGCDTLDISVPPGSRNLPFFVVFSNDHSSGTKETRLELREM |
| | | | ISHEQESVLKKLSKDGSTEAGESSHEEDTDGHYAAGSTLARRKRSAGAGSHCQKT |
| | | | SLRVNFEDIGWDSWIIAPKEYEAYECKGGCFFPLADDVTPTKHAIVQTLVHLKFP |
| | | | TKVGKACCVPTKLSPISVLYKDDMGVPTLKYHYEGMSVAECGCR* |
| 775 | 187 | 354 | MFGMIKRRVRRAVFVGRTVLCGSCNSGIIMHRGKTPPLKMVCRFEESFSCLFLNS |
| | | | * |
| 776 | 22 | 168 | MGFLFLLDSALMQTWVTVIDVSLHHVEIKAPRIRLMWSLPLRRQKYTM* |
| 777 | 37 | 357 | MLATLACMAIPWTHLGCSCLLACLPFSHHLGLSEDIISSEKLPSVTMLSKILQHF |
| | | | SHPLSHYSAFSETLVLPETYLFTCLASFLPHYHVSFLRVRDLVRDNHCILRV* |
| 778 | 85 | 225 | MHTPHLPNIIVYFILLYICSQYLYLLTIRHNHLTQSLFYNKLLSVL* |
| 779 | 187 | 396 | MPVTPDPSAVSLFVTPWPLLLCLPWPHRVPGQSHPGLHSRAPVHRLKPGPPARLQ |
| | | | LPAAHRNLRHLSIF* |
| 780 | 9 | 218 | MSWYTCQCLFFLSNTLRNGATSCHWYCSPDDMQMVDFSSTYERIFRPFVFKIKGP |
| | | | DSFRIDMSPIPEDI* |
| 781 | 398 | 192 | MARSARTFLLSSTWHLTKFPMSAGYFSPCSWLAAVIRLIQRVLMFFFFRYRALVH |
| | | | FTKARITVLTANL* |
| 782 | 216 | 791 | MAGPELLLDSNIRLWVVLPIVIITFFVGMIRHYVSILLQSDKKLTQEQVSDSQVL |
| | | | IRSRVLRENGKYIPKQSFLTRKYYFNNPEDGFFKKTKRKVVPPSPMTDPTMLTDM |
| | | | MKGNVTNVLPMILIGGWINMTFSGFVTTKVPFPLTLRFKPMLQQGIELLTLDASW |
| | | | VSSASLGTSPMVFGLRSIYSSDSGPR* |
| 783 | 285 | 440 | MLFVVLPLLIIVFNIPMREAVFDFLFMIKIIKVLKVFYCIACFIIKQALVF* |
| 784 | 277 | 471 | MVTYFIKCFHYEVSFLLWFAVVRNDVDRPVSLSLFSSYSLFSTYPDTCPLFKLPT |
| | | | HLLCCLEEI * |
| 785 | 256 | 429 | MAVPIMLFYFSLLYKSLAFFESYSFAEYHPPTSGRQGCVKDILKRLIWFLIHLHL |
| | | | DAG |
| 786 | 412 | 672 | MAVKNVALVITWAYGFVKVTLSLLVFCVYCMYVILHLRMYITHKGACRHMSASWL |
| | | | ATNCLWPWGCHSTFHLEIENNNTIILLELCA* |
| 787 | 778 | 975 | MFGVSGFCLLFTFLELVLLGLGRWWRTWKHKSSSSKYFLTSESTRRHKKATDSLP |
| | | | VVETKEQFQEA |
| 788 | 15 | 1334 | MAAARCWRPLLRGPRLSLHTAANAAATATETTCQDVAATPVARYPPIVASMTADS |
| | | | KAARLRRIERWQATVHAAESVDEKLRILTKMQFMKYMVYPQTFALNADRWYQYFT |
| | | | KTVFLSGLPPPPAEPEPEPEPEPEPALDLAALRAVACDCLLQEHFYLRRRRRVHR |
| | | | YEESEVISLPFLDQLVSTLVGLLSPHNPALAAAALDYRCPVHFYWVRGEEIIPRG |
| | | | HRRGRIDDLRYQIDDKPNNQIRISKQLAEFVPLDYSVPIEIPTIKCKPDKLPLFK |
| | | | RQYENHIFVGSKTADPCCYGHTQFHLLPDKLRRERLLRQNCADQIEVVFRANAIA |
| | | | SLFAWTGAQAMYQGFWSEADVTRPFVSQAVITDGKYFSFFCYQLNTLALTTQADQ |
| | | | NNPRKNICWGTQSKPLYETIEDNDVKGFNDDVLLQIVHFLLNRPKEEKSQLLEN* |
| 789 | 680 | 880 | MGLFAIHISSWLLRACFLIIENFESVLYISNTHPFIYMGLHRFFSQPSVWILLFL |
| | | | TGPLNTKSYYH* |
| 790 | 85 | 315 | MFKVVFCFGLVWFCFQRAHKPIRFEKHNFTINEGNLFSMNIPIVTIRSHHRTSCY |
| | | | HKLITCEQQTVFTNIKRHSKL* |
| 791 | 112 | 273 | MNLYLFAVLFFYVFLHIKIIFICFATKWHNLFSKFSYFCILHVKALSLNLGSG* |
| 792 | 142 | 297 | MYSLSLQLPVLCVLKSFKAYSLLWGVSTGVKEGFAGRTIVNHESYYLRIVW* |
| 793 | 127 | 315 | MCTLFMHLLFCHLQSIQLKQELRLNYLTLTQFWQRCYSEMIFFCLSKVFLHVFQD |
| | | | GLEHHLE* |
| 794 | 1401 | 1553 | MFATTLGVMGLWSGIIICTVFQAVCFLGFIIQLNWKKACQQGALKTLKEF* |
| 795 | 181 | 390 | MHLTLSLLLFSLHFPTYIIRVNFCLVSNLFQRMRSTKLLRLIDLDFSFTFSLLDL |
| | | | PPVTNEYDMYIRNFGK |
| 796 | 849 | 1322 | MVKSVIFLSFWQGMLLAILEKCGAIPKIHSARVSVGEGTVAAGYQDFIICGEMFF |
| | | | AALALRHAFTYKVYADKRLDAQGRCAPMKSISSSLKETMNPHDIVQDAIHNFSPA |
| | | | YQQYTQQSTLEPGPTWRGGAHGLSRSHSLSGARDNEKTLLLSSDDEF* |
| 797 | 80 | 271 | MGKKVTLLLQKCAWLLLVCCLFTGIKYLNKCFITDRELLRDVHNALNILRHNFYV |
| | | | NWASLNTF* |
| 798 | 249 | 518 | MVQLFIPILKFQLGYSVLSLCNHVLEFLFPSSLSGIFSSSLPLLLPFPLSLPSLP |
| | | | PSLFPSLRVLLCRPHWSVASNSWAVAILLPQPPE* |
| 799 | 481 | 651 | MYLLILLSTKFSCISSLPGLDYRQDSMLCQGISLAPTLLIIHLFMCIMIKYKPLI |
| | | | R* |
| 800 | 148 | 288 | MCVHPYVCTCACMHVCVCLCAWCLSQPGGLGGFSEEVTSLPRPRAL* |
| 801 | 154 | 510 | MLFLKKIQFLKCNKVFRSLDFCVALPLLFSSSAVLQITPVDTFSDPHLVLTLVKL |
| | | | LMNILNIAVISLTFPGEYEVSLAFENILMYTHAFIICFCNRQWLFKSNSESNLSS |
| | | | NVNLFDSC* |
| 802 | 99 | 434 | MQLHGKGSQDPSTKGHIKALQTVTSFLLLCAIYFLSMIISVCNFGRLEKQPVFMF |
| | | | CQAIIFSYPSTHPFILILGNKKLKQIFLSVLRHVRYWVKDRSLRLHRFTRGALCV |
| | | | F* |
| 803 | 1189 | 233 | MAPWAEAEHSALNPLRAVWLTLTAAFLLTLLLQLLPPGLLPGCAIFQDLIRYGKT |
| | | | KCGEPSRPAACRAFDVPKRYFSHFYIISVLWNGFLLWCLTQSLFLGAPFPSWLHG |
| | | | LLRILGAAQFQGGELAISAFLVLVFLWLHSLRRLFECLYVSVFSNVMIHVVQYCF |
| | | | GLVYYVLVGLTVLSQVPMDGRNAYITGKNLLMQARWFHILGMMMFIWSSAHQYKC |
| | | | HVILGNLRKNKAGVVIHCNHRIPFGDWFEYVSSPNYLAELMIYVSMAVTFGFHNL |
| | | | TWWLVVTNVFFNQALSAFLSHQFYKSKFVSYPKHRKAFLPFLF* |
| 804 | 92 | 1246 | MEFGLSWLFLVAILKGVQCEVQLVESGGGLVQPGGSLRLSCAASGFTFSSYAMSW |
| | | | VRQAPGKGLEWVSGLSGSGGSSTYYADSVKGRFTISRDNSKGTLYLQMNSLRADD |
| | | | TARYYCAKGGVELASTKPSSIWRLNPIRYWYFDLWGQGTLVTVSSGDGSSGGSGG |
| | | | ASTGEIVLTQSPGTLSLSPGERATLSCRASQSVSSSYLAWYQQKPGQAPRLLIYG |
| | | | ASSRATGIPDRFSGSGSGTDFTLTISRLEPEDFAVYYCQQYGSSPTTFGQGTKVD |
| | | | IKRTVAAPSVFIFPPSDEQLKSGTASVVCLLNNFYPREAKVQWKVDNALQSGNSQ |
| | | | ESVTEQDSKDSTYSLSSTLTLSKADYEKHKVYACEVTHQGLSSPVTKSFNRGEC* |
| 805 | 92 | 1246 | MEFGLSWLFLVAILKGVQCEVQLVESGGGLVQPGGSLRLSCAASGFTFSSYAMSW |
| | | | VRQAPGKGLEWVSGLSGSGGSSTYYADSVKGRFTISRDNSKGTLYLQMNSLRADD |
| | | | TARYYCAKGGVELASTKPSSIWRLNPIRYWYFDLWGQGTLVTVSSGDGSSGGSGG |
| | | | ASTGEIVLTQSPGTLSLSPGERATLSCRASQSVSSSYLAWYQQKPGQAPRLLIYG |
| | | | ASSRATGIPDRFSGSGSGTDFTLTISRLEPEDFAVYYCQQYGSSPTITFGQGTKV |
| | | | DIKRTVAAPSVFIFPPSDEQLKSGTASVVCLLNNFYPREAKVQWKVDNALQSGNS |
| | | | QESVTEQDSKDSTYSLSSTLTLSKADYEKHKVYACEVTHQGLSSPVTKSFNRGEC |
| | | | * |
| 806 | 92 | 1246 | MEFGLSWLFLVAILKGVQCEVQLVESGGGLVPGGSLRLSCAASGFTFSSYAMSWV |
| | | | RQAPGKGLEWVSGLSGSGGSSTYYADSVKGRFTISRDNSKGTLYLQMNSLRADDT |
| | | | ARYYCAKGGVELASTKPSSIWRLNPIRYWYFDLWGQGTLVTVSSGDGSSGGSGGA |
| | | | STGEIVLTQSPGTLSLSPGERATLSCRASQSVSSSYLAWYQQKPGQAPRLLIYGA |
| | | | SSRATGIPDRFSGSGSGTDFTLTISRLEPEDFAVYYCQQYGSSPTTFGQGTKVDI |
| | | | KRTVAAPSVFIFPPSDEQLKSGTASVVCLLNNFYPREAKVQWKVDNALQSGNSQE |
| | | | SVTEQDSKDSTYSLSSTLTLSKADYEKHKVYACEVTHQGLSSPVTKSFNRGEC* |
| 807 | 92 | 1246 | MEFGLSWLFLVAILKGVQCEVQLVESGGGLVQPGGSLRLSCAASGFTFSSYAMSW |
| | | | VRQAPGKGLEWVSGLSGSGGSSTYYADSVKGRFTISRDNSKGTLYLQMNSLRADD |
| | | | TARYYCAKGGVELASTKPSSIWRLNPIRYWYFDLWGQGTLVTVSSGDGSSGGSGG |
| | | | ASTGEIVLTQSPGTLSLSPGERATLSCRASQSVSSSYLAWYQQKPGQAPRLLIYG |
| | | | GIPDRFSGSGSGTDFTLTISRLEPEDFAVYYCQQYGSSPTTFGQGTKVDIKRTVA |
| | | | APSVFIFPPSDEQLKSGTASVVCLLNNFYPREAKVQWKVDNALQSGNSQESVTEQ |
| | | | DSKDSTYSLSSTLTLSKADYEKHKVYACEVTHQGLSSPVTKSFNRGEC* |
| 808 | 63 | 203 | MEPPYFSLILLLFTFASKFFLSLNLKKSNIVKARIESTKTVISKRC* |
| 809 | 157 | 387 | MQSVIRKQFTALAGFCFWFCLFTLAVLSLTLLICKLRIMPFKLEGLFQELNKSWH |
| | | | MKLLSQDRELINMLLLLMGRS* |
| 810 | 50 | 3616 | MDLPRGLVVAWALSLWPGFTDTFNMDTRKPRVIPGSRTAFFGYTVQQHDISGNKW |
| | | | LVVGAPLETNGYQKTGDVYKCPVIHGNCTKLNLGRVTLSNVSERKDNMRLGLSLA |
| | | | TNPKDNSFLACSPLWSHECGSSYYTTGMCSRVNSNFRFSKTVAPALQRCQTYMDI |
| | | | VIVLDGSNSIYPWVEVQHFLINILKKFYIGPGQIQVGVVQYGEDVVHEFHLNDYR |
| | | | SVKDVVEAASHIEQRGGTETRTAFGIEFARSEAFQKGGRKGAKKVMIVITDGESH |
| | | | DSPDLEKVIQQSERDNVTRYAVAVLGYYNRRGINPETFLNEIKYIASDPDDKHFF |
| | | | NVTDEAALKDIVDALGDRIFSLEGTNKNETSFGLEMSQTGFSSHVVEDGVLLGAV |
| | | | GAYDWNGAVLKETSAGKVIPLRESYLKEFPEELKNHGAYLGYTVTSVVSSRQGRV |
| | | | YVAGAPRFNHTGKVILFTMHNNRSLTIHQAMRGQQIGSYFGSEITSVDIDGDGVT |
| | | | DVLLVGAPMYFNEGRERGKVYVYELRQNRFVYNGTLKDSHSYQNARFGSSIASVR |
| | | | DLNQDSYNDVVVGAPLEDNHAGAIYIFHGFRGSILKTPKQRITASELATGLQYFG |
| | | | CSIHGQLDLNEDGLIDLAVGALGNAVILWSRPVVQINASLHFEPSKNIFHRDCKR |
| | | | SGRDATCLAAFLCFTPIFLAPHFQTTTVGIRYNATMDERRYTPRAHLDEGGDRFT |
| | | | NRAVLLSSGQELCERINFHVLDTADYVKPVTFSVEYSLEDPDHGPMLDDGWPTTL |
| | | | RVSVPFWNGCNEDEHCVPDLVLDARSDLPTAMEYCQRVLRKPAQDCSAYTLSFDT |
| | | | TVFIIESTRQRVAVEATLENRGENAYSTVLNISQSANLQFASLIQKEDSDGSIEC |
| | | | VNEERRLQKQVCNVSYPFFRAKAKVAFRLDFEFSKSIFLHHLEIELAAGSDSNER |
| | | | DSTKEDNVAPLRFHLKYEVDVLFTRSSSLSHYEVKPNSSLERYDGIGPPFSCIFR |
| | | | IQNLGLFPIHGMMMKITIPIATRSGNRLLKLRDFLTDEANTSCNIWGNSTEYRPT |
| | | | PVEEDLRRAPQLNHSNSDVVSINCNIRLVPNQEINFHLLGNLWLRSLKALKYKSM |
| | | | KIMVNAALQRQFHSPFIFREEDPSRQIVFEISKQEDWQVPIWIIVGSTLGGLLLL |
| | | | ALLVLALWKLGFFRSARRRREPGLDPTPKVLE* |
| 811 | 261 | 419 | MALNIIINPVWFCHCLTCTIHIDFHILFIKIFKHMFFRSLWSSWLSHQLDHI* |
| 812 | 49 | 282 | MAIFPLWKGVNVLVCIFSSFIMLNIYCTLLIWKFIYSAFFCYITSLMLIFPFSFF |
| | | | CSFFLDLLKVIVYIFFLYLYSSR* |
| 813 | 147 | 293 | MGYLLWLVLSILVCTELGLGRLTFPLDSESPRTSYKVRPWVVLEAWVW* |
| 814 | 418 | 155 | MCLSHLVSLFPAATAFLINKVPLPVDKLAPLPLDNILPFMDPLKLLLKTLGISVE |
| | | | HLVEGLRKCVNELGPEASEAVKKLLEALSHLV* |
| 815 | 32 | 742 | MAWIPLFLGVLAYCTGAVASYELTQPPSVSVSPGQTASITCSGDRLGDKIACWYQ |
| | | | LKPGQSPLVVIHQDTKRPSGIPERFSGSNSGNTATLTISGTQAMDEADYYCQAWD |
| | | | SSSYVAFGGGTKLTVLGQPKAAPSVTLFPPSSEELQANKATLVCLISDFYPGVVT |
| | | | TVAWKADSSPVKAGVETTTPSKQSNNKYAVSSYLSLTPEQWKSHRSYSCQVTHEG |
| | | | STVEKTVAPTEYLLRVY* |
| 816 | 160 | 1701 | MPGLGRRAQWLCWWWGLLCSCCGPPPLRPPLPAAAAAAAGGQLLGDGGSPGRTEQ |
| | | | PPPSPQSSSGFLYRRLKTQEKREMQKEILSVLGLPHRPRPLHGLQQPQPPALRQQ |
| | | | EEQQQQQQLPRGEPPPGRLKSAPLFMLDLYNALSADNDEDGASEGERQQSWPHEA |
| | | | ASSSQRRQPPPGAAHPLNRKSLLAPGSGSGGASPLTSAQDSAFLNDADMVMSFVN |
| | | | LVEYDKEFSPRQRHHKEFKFNLSQIPEGEVVTAAEFRIYKDCVMGSFKNQTFLIS |
| | | | IYQVLQEHQHRDSDLFLLDTRVVWASKEGWLEFDITATSNLWVVTPQHNMGLQLS |
| | | | VVTRDGVHVHPRAAGLVGRDGPYDKQPFMVAFFKVSEVHVRTTRSASSRRRQQSR |
| | | | NRSTQSQDVARVSSASDYNSSELKTACRKHELYVSFQDLGWQDWIIAPKGYAANY |
| | | | CDGECSFPLNAHMNATNHAIVQTLVHLMNPEYVPKPCCAPTKLNAISVLYFDDNS |
| | | | NVILKKYRNMVVRACGCH* |
| 817 | 7 | 942 | MGCRLLCCAVLCLLGAVPMETGVTQTPRHLVMGMTNKKSLKCEQHLGHNAMYWYK |
| | | | QSAKKPLELMFVYNFKEQTENNSVPSRFSPECPNSSHLFLHLHTLQPEDSALYLC |
| | | | ASSQVGGYNEQFFGPGTRLTVLEDLKNVFPPEVAVFEPSEAEISHTQKATLVCLA |
| | | | TGFYPDHVELSWWVNGKEVHSGVSTDPQPLKEQPALNDSRYCLSSRLRVSATFWQ |
| | | | NPRNHFRCQVQFYGLSENDEWTQDRAKPVTQIVSAEAWGRADCGFTSESYQQGVL |
| | | | SATILYEILLGKATLYAVLVSALVLMAMVKRKDSRG* |
| 818 | 1355 | 1672 | MALLCICLCLIFFLIVKARRKQAAGRPEKMDDEDPIMGTITSGSRKKPWPDSPGD |
| | | | QASPPGDAPPLEEQKELHYASLSFSEMKSREPKDQEAPSTTEYSEIKTSK* |
| 819 | 3461 | 3685 | MVVGIVAAAALCILILLYAMYKYRNRDEGSYQVDETRNYISNSAQSNGTLMKEKQ |
| | | | QSSKSGHKKQKNKDREYYV* |
| 820 | 3461 | 3685 | MVVGIVAAAALCILILLYAMYKYRNRDEGSYQVDETRNYISNSAQSNGTLMKEKQQ |
| | | | SSKSGHKKQKNKDREYYV* |
| 821 | 129 | 272 | MGSLMPLRPLALHTALGAALNFSLPCEWSTLPSASEAGRLWGPPSFQ* |
| 822 | 98 | 1474 | MAWASRLGLLLALLLPVVGASTPGTVVRLNKAALSYVSEIGKAPLQRALQVTVPHF |
| | | | LDWSGEALQPTRIRILNVHVPRLHLKFIAGFGVRLLAAANFTFKVFRAPEPLELTL |
| | | | PVELLADTRVTQSSIRTPVVSISACSLFSGHANEFDGSNSTSHALLVLVQKHIKAV |
| | | | LSNKLCLSISNLVQGVNVHLGTLIGLNPVGPESQIRYSMVSVPTVTSDYISLEVNA |
| | | | VLFLLGKPIILPTDATPFVLPRHVGTEGSMATVGLSQQLFDSALLLLQKAGALNLD |
| | | | ITGQLRSDDNLLNTSALGRLIPEVARQFPEPMPVVLKVRLGATPVAMLHTNNATLR |
| | | | LQPFVEVLATASNSAFQSLFSLDVVVNLRLQLSVSKVKLQGTTSVLGDVQLTVASS |
| | | | NVGFIDTDQVRTLMGTVFEKPLLDHLNALLAMGIALPGVVNLHYVAPEIFVYEGYV |
| | | | VISSGLFYQS* |
| 823 | 177 | 377 | MKLVLLRKTSLSVFTTLFSVSSSQYPVLSTSICNTPVFSTLFLEACSVNPLPSTVF |
| | | | LVLLYSVACL* |
| 824 | 1629 | 1123 | MIFVLGQAEGILIMLAMTALTVRRSEPSLSTCQQGEDPLDWTVSLLLMAGLCTFFS |
| | | | CILAVFFHTPYRRLQAESGEPPSTRNAVGSQTQGRVWTEGEARKGLGSWGPARRIP |
| | | | ELHGEGGASLRGPQEGHGSPHPACHRATPRAQGPAATDAPFPPGQTRRQGPSVQUY |
| | | | * |
| 825 | 381 | 572 | MLLAKRYAKYFIYFIFFNPVLIPILQRRILRLGEIHIAGQCRAGSLQSLPLPANLH |
| | | | SILDILA* |
| 826 | 758 | 618 | MLLCLHLIIICLVFCIISAIPWVLNQCLIFRLYFLCQKKLAMSLEN* |
| 827 | 184 | 360 | MLIGSGYLCFCALQWTELGNVCVCAHICRCTHMQVSGITSPVHVHIHRVLSCLIHF |
| | | | TS * |
| 828 | 140 | 355 | MHLLVSHAFLPFPLHGYSGRQRGAKQWRCHPARASRERPSEDNLSPAVKEESGFVV |
| | | | SEHLAALHRKLRGCH* |
| 829 | 21 | 956 | MLLLLLLLGLAGSGLGAVVSQHPSWVICKSGTSVKIECRSLDFQATTMFWYRQFPK |
| | | | QSLMLMATSNEGSKATYEQGVEKDKFLINHASLTLSTLTVTVLEDLKNVFPPEVAV |
| | | | FEPSEAEISHTQKATLVCLATGFYPDHVELSWWVNGKEVHSGVSTDPQPLKEQPAL |
| | | | NDSRYCLSSRLRVSATFWQNPRNHFRCQVQFYGLSENDEWTQDRAKPVTQIVSAEA |
| | | | WGRADCGFTSESYQQGVLSATILYEILLGKATLYAVLVSALVLMAMVKRKDSRG* |
| 830 | 134 | 292 | MSVGLHLGFLAWFLPFLIPTSPLPLLFQLGALPNESLALYAWLRDCFWENIT* |
| 831 | 58 | 258 | MSSPCFQCFHLCCTIKVWPLCHHLQKAFPDFSIHVFSESDLSSFCEVQLLKICLQK |
| | | | YFLGSLMHCS* |
| 832 | 68 | 259 | MIKLCHQLYNVYVCFFHLIVLGDIAIDYIIVPNISYLSISIPFVVTNTIRGRDIFH |
| | | | PCNVALVM* |
| 833 | 290 | 430 | MFYENKRREYLQDMLLSYRLLVAILVLLKKLTELNTITLICKSIIF* |
| 834 | 112 | 267 | MNIVFVILLFKDMQVLEVFVLLNVLTTLTIIAAGILCTSFCCKPFIYINPL* |
| 835 | 58 | 240 | MIRFALPWFSQIWLSKQTWTRLTHLAFLLQECNSMFYPKVSRTTVFGCLFNPLSSR |
| | | | VCFE* |
| 836 | 30 | 296 | MTNFFHLLLPLLPSLFSPSSKTHSFNIHKIIIIILFFNSIFLYPRDYLKIRNWLQS |
| | | | NTLEREIEWITSIRCLCNSGTTFIFPLTTKST* |
| 837 | 1089 | 952 | MLYLLLFPGVSYLRSLFLGRPIGPGITSDFTLILFSNLLDSWPLS* |
| 838 | 500 | 670 | MPCSVPETLFSLLWLAPSHHSGFSSNEASLRTDLLFATAILYSLWHPPYYFLYNTS |
| | | | * |
| 839 | 84 | 251 | [sequence omitted] |
| 840 | 99 | 245 | MILNLSSLTLVFAWNYPLHLMISLNVSCSCYSDDISGIYRSVLRQKLG* |
| 841 | 82 | 297 | MCLILVIWKIHYAELIMLNKRVVNKCRSCLIQKCLSTCHSTVIVLYQCREEEAVML |
| | | | IKLNFKMKIQRTICI * |
| 842 | 36 | 275 | MNLKRLLLFLAKMFSAIFSLPTHPSHFPISIYDNIGHWPQSPKVRRKEGNEYLLNP |
| | | | NMCQTLDLTLLGIGDYLTSITSP* |
| 843 | 165 | 437 | MAPLPSLTLRPWCVLMLLDLWAAFGTITPSLKHFHHLPSGTQHSLVFVLSLTLHSQ |
| | | | LSLLMGTSAVCLSACFSSLSTFPGWLLIICTLMI * |
| 844 | 322 | 462 | MFLLDLCLGSLSVFIDTHPCMHGGFKCSQDWCSPAKLLLSAFTKTR* |
| 845 | 182 | 358 | MLSLVKLLLLCIIHDHSINFCIAIQVGLLPSAYRVPGIVLSLENTALIRQTPCSNR |
| | | | AN* |
| 846 | 98 | 805 | MRPLAGGLLKVVFVVFASLCAWYSGYLLAELIPDAPLSSAAYSIRSIGERPVLKAP |
| | | | VPKRQKCDHWITPCPSDTYAYRLLSGGGRSKYAKICFEDNLLMGEQLGNVARGINI |
| | | | AIVNYVTGNVTATRCFDMYEGDNSGPMTKFIQSAAPKSLLFMVTYDDGSTRLNNDA |
| | | | KNAIEALGSKEIRNMKFRSSWVFIAAKGLELPSEIQREKINHSDAKNNRYSGWPAE |
| | | | IQIEGCIPKERS* |
| 847 | 1608 | 1805 | MLPFCHLWVPVTLVAAGAAQPAASMVMFPHLPALHHHCPHSHRTSQYMPASDGPQA |
| | | | YPDYADQST* |
| 848 | 386 | 592 | MNPCFCGFLVLLSCCLSLLDSQLHNLIALQITCFKDVEIPNFFCDPSQLPHHACCD |
| | | | TFTNNIVMYFPAA |
| 849 | 1074 | 2294 | MLLLLLLLPLLWGTKGMEGDRQYGDGYLLQVQELVTVQEGLCVHVPCSFSYPQDGW |
| | | | TDSDPVHGYWFRAGDRPYQDAPVATNNPDREVQAETQGRFQLLGDIWSNDCSLSIR |
| | | | DARKRDKGSYFFRLERGSMKWSYKSQLNYKTKQLSVFVTDPPWNLTMTVFQGDATA |
| | | | STALGNGSSLSVLEGQSLRLVCAVNSNPPARLSWTRGSLTLCPSRSSNPGLLELPR |
| | | | VHVRDEGEFTCRAQNAQGSQHISLSLSLQNEGTGTSRPVSQVTLAAVGGAGATALA |
| | | | FLSFCIIFIIVRSCRKKSARPAAGVGDTGMEDAKAIRGSASQGPLTESWKDGNPLK |
| | | | KPPPAVAPSSGEEGELHYATLSFHKVKPQDPQGQEATDSEYSEIKIHAKRETAETQ |
| | | | ACLRNHNPSSKEVRG* |
| 850 | 100 | 318 | MYYTLCNFVFFTLHMILFPKSLNILLSNQIRSAIVHLKQRTSCIKNQPEPYQRADA |
| | | | MNTNHSLVAVPYVNLI* |
| 851 | 328 | 549 | MFWMVKILTPKASTFQVTTSVSVPLTSATGAACSGSCFHSTGCAGRPQTHAGAPCA |
| | | | SEQNSRNEVMQTSTNEM* |
| 852 | 162 | 440 | MHCRQLKEVLQLPLTCSSCCVCTMTVAFPSVQQVWMETVLTLGGLDAAQDEIQAVR |
| | | | LILLPESSPQGPHGNLAPCSAKPFFLPQVMPLGTAP* |
| 853 | 39 | 839 | MVCLRLPGGSCMAVLTVTLMVLSSPLALAGDTRPRFLEYSTSECHFFNGTERVRFL |
| | | | DRYFYNQEEYVRFDSDVGEFRAVTELGRPDEEYWNSQKDFLEDRRAAVDTYCRHNY |
| | | | GVVESFTVQRRVHPKVTVYPSKTQPLQHHNLLVCSVSGFYPGSIEVRWFRNGQEEK |
| | | | TGVVSTGLIHNGDWTFQTLVMIETVPRSGEVYTCQVEHPSVTSPLTVEWRARSESA |
| | | | QSKMLSGVGGFVLGLLFLGAGLFIYFRNQKGHSGLQPRGFLS* |
| 854 | 54 | 1034 | MMSPSQASLLFLNVCIFICGEVVQGNCVHHSTDSSVVNIVEDGSNAKDESKSNDTV |
| | | | CKEDCEESCDVKTKITREEKHFMCRNLQNSIVSYTRSTKKLLRNMMDEQQASLDYL |
| | | | SNQVNELMNRVLLLTTEVFRKQLDPFPHRPVQSHGLDCTDIKDTIGSVTKTPSGLY |
| | | | IIHPEGSSYPFEVMCDMDYRGGGWTVIQKRIDGIIDFQRLWCDYLDGFGDLLGDAF |
| | | | RGLKKEDNQNAMPFSTSDVDNDGCRPACLVNGQSVKSCSHLHNKTGWWFNECGLAN |
| | | | LNGIHHFSGKLLATGIQWGTWTKNNSPVKIKSVSMKIRRMYNPYFK* |
| 855 | 124 | 336 | MRTWSKVIPSLWLKFSRGFIILRFHFLMIIWPDIPSSMYICMSFITAFKNLFMFGI |
| | | | NRIKKISVVSRNTL* |
| 856 | 159 | 1028 | MGLCVPFAVTTSFLSLGLEWDLNVRLHGQHLVQQLVLRTVRGYLETPQPEKALALS |
| | | | FHGWSGTGKNFVARMLVENLYRDGLMSDCVRMFIATFHFPHPKYVDLYKEQLMSQI |
| | | | RETQQLCHQTLFIFDEAEKLHPGLLEVLGPHLERRAPEGHRAESPWTIFLFLSNLR |
| | | | GDIINEVVLKLLKAGWSREEITMEHLEPHLQAEIVETIDNGFGHSRLVKENLIDYF |
| | | | IPFLPLEYRHVRLCARDAFLSQELLYKEETLDEIAQMMVYVPKEEQLFSSQGCKSI |
| | | | SQRINYFLS* |
| 857 | 182 | 334 | MKSSNIFSLFLFLVTFIFLTSIASILFSSWCPFSLIKCNQDLYYSGNGAS* |
| 858 | 35 | 172 | MLCSLFHILIVTLLLAISFGMSSRNTLNMVNSKIKEHSLHRKLEI* |
| 859 | 6 | 215 | MFWTLVQGMSLLCLTDVFQALPSICIANSEIIYYTVLTLMQFNCLWMVLSGKKVIF |
| | | | SSELMVRKGRRSWK* |
| 860 | 204 | 350 | MYLKPLIYFSILIFLSQRSKLSLPYNVHNCMNIGEDRRPQKVQLLQLY* |
| 861 | 263 | 412 | [sequence omitted] |
| 862 | 169 | 879 | MTAEFLSLLCLGLCLGYEDEKKNEKPPKPSLHAWPSSVVEAESNVTLKCQAHSQNV |
| | | | TFVLRKVNDSGYKQEQSSAENEAEFPFTPLKPKDAGRYFCAYKTFASHEWSESSEH |
| | | | LQLVVTDKHDELEAPSMKTDTRTIFVAIFSCISILLLFLSVFIIYRCSQHSSSSEE |
| | | | STKRTSHSKLPEQEAAEADLSNMERVSLSTADPQGVTYAELSTSALSEAASDTFFQ |
| | | | EPPGSHEYAALKV* |
| 863 | 114 | 1031 | MPLLTLYLLLFWLSGYSIATQITGPTTVNGLERGSLTVQCVYRSGWETYLKWWCRG |
| | | | AIWRDCKILVKTSGSEQEVKRDRVSIKDNQKNRTFTVTMEDLMKTDADTYWCGIEK |
| | | | TGNDLGVTVQVTIDPASTPAPTTPTSTTFTAPVTQEETSSSPTLTGHHLDNRHKLL |
| | | | KLSVLLPLIFTILLLLLVAASLLAWRMMKYQQKAAGMSPEQVLQPLEGDLCYADLT |
| | | | LQLAGTSPQKATTKLSSAQVDQVEVEYVTMASLPKEDISYASLTLGAEDQEPTYCN |
| | | | MGHLSSHLPGRGPEEPTEYSTISRP* |
| 864 | 64 | 435 | MRISCPWCLWNLSLEVGGTVATTAQQHIAEVCRSSQAGRGFLHCLHPALGTSGCHP |
| | | | VPCSSSLVGFGWRGYSGEASWGRASSRPAAPTPPMPANVQAGWEQSVRLLCHSWLR |
| | | | LAALHVTHEES * |
| 865 | 391 | 528 | [sequence omitted] |
| 866 | 46 | 612 | MDWTWRFLFVVAAATGVQSQVQLVQSGAEVKKPGSSVKVSCKASGGTFSTYAISWV |
| | | | RQAPGQGLEWMGGIIPIFGTANYAQKFQGRVTITADESTSTAYMELSSLRSEDTAV |
| | | | YYCARVWGGSGSYYSIVSTIGATTFVWMSGAREPWSPSPQPPPRAHRSSPWHPPPR |
| | | | APLGAQRPWAAWSRTTSPNR* |
| 867 | 46 | 612 | MDWTWRFLFVVAAATGVQSQVQLVQSGAEVKKPGSSVKVSCKASGGTFSTYAISWV |
| | | | RQAPGQGLEWMGGIIPIFGTANYAQKFQGRVTITADESTSTAYMELSSLRSEDTAV |
| | | | YYCARVWGGSGSYYSIVSTIGATTTVWMSGAREPWSPSPQPPPRAHRSSPWHPPPR |
| | | | APLGAQRIPWAAWSRTTSPNR* |
| 868 | 133 | 960 | MACPGFLWALVISTCLEFSMAQTVTQSQPEMSVQEAETVTLSCTYDTSESDYYLFW |
| | | | YKQPPSRQMILVIRQEAYKQQNATENRFSVNFQKAAKSFSLKISDSQLGDAAMYFC |
| | | | AYRSGRDDKIIFGKGTRLHILPNIQNPDPAVYQLRDSKSSDKSVCLFTDFDSQTNV |
| | | | SQSKDSDVYITDKTVLDMRSMDFKSNSAVAWSNKSDFACANAFNNSIIPEDTFFPS |
| | | | PESSCDVKLVEKSFETDTNLNFQNLSVIGFRILLLKVAGFNLLMTLRLWSS* |
| 869 | 164 | 310 | MVLRLPWWGVLAYGNDVGFGFYSFLCYQINPPTCPILWLWEVLTVGKS * |
| 870 | 959 | 1252 | MEFLGPCGLRLVGARPLLPYWLLVFLAALNALLQWLLRPLVLYAPLLNPYTLAVAN |
| | | | TTFTVSTDKAQRHFGYEPPFSWEDSRTRTILWVQAATGSAQ* |
| 871 | 52 | 828 | MPRPRRVSQLLDLCLWCFMKNISRYLTDIKPLPPNIKDRLIKIMSMQGQITDSNIS |
| | | | EILHPEVQTLDLRSCDISDAALLHLSNCRKLKKLNLNASKGNRVSVTSEGIKAVAS |
| | | | SCSYLHEASLKRCCNLTDEGVVALALNCQLLKIIDLGGCLSITDVSLHALGKNCPF |
| | | | LQCVDFSATQVSDSGVIALVSGPCAKKLEEIHMGHCVNLTDGAVEAVLTYCPQIRI |
| | | | LLFHGCPLITDHSREVLEQLVGPNKLKQVTWTVY* |
| 872 | 313 | 1704 | MLLLLLPLLWGRERAEGQTSKLLTMQSSVTVQEGLCVHVPCSFSYPSHGWIYPGPV |
| | | | VHGYWFREGANTDQDAPVATNNPARAVWEETRDRFHLLGDPHTENCTLSIRDARRS |
| | | | DAGRYFFRMEKGSIKWNYKHHRLSVNVTALTHRPNILIPGTLESGCPQNLTCSVPW |
| | | | ACEQGTPPMISWIGTSVSPLDPSTTRSSVLTLIPQPQDHGTSLTCQVTFPGASVTF |
| | | | FNKTVHLNVSYPPQNLTMTVFQGDGTVSTVLGNGSSLSLPEGQSLRLVCAVDAVDS |
| | | | NPPARLSLSWRGLTLCPSQPSNPGVLELPWVHLRDEDEFTCRAQNPLGSQQVYLNV |
| | | | SLQSKATSGVTQGAVGGAGATALVFLSFCVIFVVVRSCRKKSARPAAGVGDTGIED |
| | | | ANAVRGSASQGPLTEPWAEDSPPDQPPPASARSSVGEGELQYASLSFQMVKPWDSR |
| | | | GQEATDTEYSEIKIHR* |
| 873 | 590 | 766 | MLFGLALQLILDLKLTTVNQRESDVARVATAEEYSKKGLLGQETLHAGSQTRMQIL |
| | | | IS* |
| 874 | 206 | 418 | MLKLLCAAEVTNVLFNCVFDYGCPKTFCHPWTIFVLFWSSLEGGFIISYKTLTGAL |
| | | | ECRFLITLEIVTSE* |
| 875 | 241 | 957 | MRSSLTMVGTLWAFLSLVTAVTSSTSYFLPYWLFGSQMGKPVSFSTFRRCNYPVRG |
| | | | EGHSLIMVEECGRYASFNAIPSLAWQMCTVVTGAGCALLLLVALAAVLGCCMEELI |
| | | | SRMMGRCMGAAQFVGGLLISSGCALYPLGWNSPEIMQTCGNVSNQFQLGTCRLGWA |
| | | | YYCAGGGAAAAMLICTWLSCFAGRNPKPVILGGKHHEENHFLCYGAWPLPSTLELR |
| | | | KEDRGGRATGKQVTP |
| 876 | 241 | 957 | MRSSLTMVGTLWAFLSLVTAVTSSTSYFLPYWLFGSQMGKPVSFSTFRRCNYPVRG |
| | | | EGHSLIMVEECGRYASFNAIPSLAWQMCTVVTGAGCALLLLVALAAVLGCCMEELI |
| | | | SRMMGRCMGAAQFVGGLLISSGCALYPLGWNSPEIMQTCGNVSNQFQLGTCRLGWA |
| | | | YYCAGGGAAAAMLICTWLSCFAGRNPKPVILGGKHHEENHFLCYGAWPLPSTLELR |
| | | | KEDRGGRATGKQVTP |
| 877 | 136 | 1710 | MSLLSLPWLGLRPVAMSPWLLLLLVVGSWLLARILAWTYAFYNNCRRLQCFPQPPK |
| | | | RNWFWGHLGLITPTEEGLKDSTQMSATYSQGFTVWLGPIIPFIVLCHPDTIRSITN |
| | | | ASAAIAPKDNLFIRFLKPWLGEGILLSGGDKWSRHRRMLTPAFHFNILKSYITIFN |
| | | | KSANIMLDKWQHLASEGSSCLDMFEHISLMTLDSLQKCIFSFDSHCQERPSEYIAT |
| | | | ILELSALVEKRSQHILQHMDFLYYLSHDGRRFHRACRLVHDFTDAVIRERRRTLPT |
| | | | TQGIDDFFKDKAKSKTLDFIDVLLLSKDEDGKALSDEDIRAEADTFMFGGHDTTAS |
| | | | GLSWVLYNLARHPEYQERCRQEVQELLKDRDPKEIEWDDLAQLPFLTMCVKESLRL |
| | | | HPPAPFISRCCTQDIVLPDGRVIPKGITCLIDIIGVHHNPTVWPDPEVYDPFRFDP |
| | | | ENSKGRSPLAFIPFSAGPRNCIGQAFAMAEMKVVLALMLLHFRYLPDHTEPRRKLE |
| | | | LIMRAEGGLWLRVEPLNVSLQ* |
| 878 | 136 | 1710 | MSLLSLPWLGLRPVAMSPWLLLLLVVGSWLLARILAWTYAFYNNCRRLQCFPQPPK |
| | | | RNWFWGHLGLITPTEEGLKDSTQMSATYSQGFTVWLGPIIPFIVLCHPDTIRSITN |
| | | | ASAAIAPKDNLFIRFLKPWLGEGILLSGGDKWSRHRRMLTPAFHFNILKSYITIFN |
| | | | KSANIMLDKWQHLASEGSSCLDMFEHISLMTLDSLQKCIFSFDSHCQERPSEYIAT |
| | | | ILELSALVEKRSQHILQHMDFLYYLSHDGRRFHRACRLVHDFTDAVIRERRRTLPT |
| | | | QGIDDFFKDKAKSKTLDFIDVLLLSKDEDGKLSDEDIRAEADTFMFGGHDTTASGL |
| | | | SWVLYNLARHPEYQERCRQEVQELLKDRDPKEIEWDDLAQLPFLTMCVKESLRLHP |
| | | | PAPFISRCCTQDIVLPDGRVIPKGITCLIDIIGVHHNPTVWPDPEVYDPFRFDPEN |
| | | | SKGRSPLAFIPFSAGPRNCIGQAFAMAEMKVVLALMLLHFRFLPDHTEPRRKLELI |
| | | | MRAEGGLWLRVEPLNVSLQ* |
| 879 | 136 | 1710 | MSLLSLPWLGLRPVAMSPWLLLLLVVGSWLLARILAWTYAFNCRRLQCFPQPPKRN |
| | | | WFWGHLGLITPTEEGLKDSTQMSATYSQGFTVWLGPIIPFIVLCHPDTIRSITNAS |
| | | | AAIAPKDNLFIRFLKPWLGEGILLSGGDKWSRHRRMLTPAFHFNILKSYITIFNKS |
| | | | ANIMLDKWQHLASEGSSCLDMFEHISLMTLDSLQKCIFSFDSHCQERPSEYIATIL |
| | | | ELSALVEKRSQHILQHMDFLYYLSHDGRRFHRACRLVHDFTDAVIRERRRTLPTQG |
| | | | IDDFFKDKAKSKTLDFIDVLLLSKDEDGKALSDEDIRAEADTFMFGGHDTTASGLS |
| | | | WVLYNLARHPEYQERCRQEVQELLKDRDPKEIEWDDLAQLPFLTMCVKESLRLHPP |
| | | | APFISRCCTQDIVLPDGRVIPKGITCLIDIIGVHHNPTVWPDPEVYDPFRFDPENS |
| | | | KGRSPLAFIPFSAGPRNCIGQAFAMAEMKVVLALMLLHFRFLPDHTEPRRKLELIM |
| | | | RAEGGLWLRVEPLNVSLQ* |
| 880 | 856 | 257 | MRLSLPLLLLLLGAWAIPGGLGVMAPLTATAPEVDDEEMYSAHMPAHLRCDACRAV |
| | | | AYQECGPKTLAKAETKLHTSNSGGRRDVSELVYTDVLDRSCSRNWQDYGVREVDQV |
| | | | KRLTGPGLSEGPEPSISVMVTGGPWHTRLSRTCLHYLGEFGEDQIYEAHQQGRGAL |
| | | | EALLCGGPPGGLLREGVSHKRRALVLDSTLL* |
| 881 | 782 | 1222 | MTLRPSLLPLHLLLLLLLSAAVCRAEAGLETESPVRTLQVETLVEPPEPCAEPAAF |
| | | | GDTLHIHYTGSLVDGRIIDTSLTRDPLVIELGQKQVIPGLEQSLLDMCVGEKRRAI |
| | | | IPSHLAYGKRGFPPSVPGTKDNLMRPPGMTSSSQ* |
| 882 | 940 | 2040 | MALRFLLGFLLAGVDLGVYLMRLELCDPTQRLRVALAGELVGVGGHFLFLGLALVS |
| | | | KDWRFLQRMITAPCILFLFYGWPGLFLESARWLIVKRQIEEAQSVLRILAERNRPH |
| | | | GQMLGEEAQEALQDLENTCPLPATSSFSFASLLNYRNIWKNLLILGFTNFIAHAIR |
| | | | HCYQPVGGGGSPSDFYLCSLLASGTAALACVFLGVTVDRFGRRGILLLSMTLTGIA |
| | | | SLVLLGLWDYLNEAAITTFSVLGLFSSQAAAILSTLLAAEVIPTTVRGRGLGLIMA |
| | | | LGALGGLSGPAQRLHMGHGAFLQHVVLAACALLCILSIMLLPETKRKLLPEVLRDG |
| | | | ELCRRPSLLRQPPPTRCDHVPLLATPNPAL* |
| 883 | 133 | 306 | MVKRKSWTKWCGWLTVVRFLARGFEMHLKSCSRLLFSELAAFAFFEFSLKTVTLRA |
| | | | F* |
| 884 | 196 | 357 | MCLMKQIIYLLYVGLCSILTAFLFTPHHVLERYRYYCPDFREIKKLGQGYTTN* |
| 885 | 252 | 560 | MKEALLKCSRLARGLLLCLDCANDHRSPVERNAQTTLILHSSLYSLSLGNQLQGGG |
| | | | EMATTGGSTQQAKTYGGLFQIGAMEPALFLLFIFLLASFWVHRAIE* |
| 886 | 46 | 189 | MLETFLFKLFLFFTLLVNLFITNDQLSVGSIFLSFQLPAFFLDMAEF* |
| 887 | 68 | 208 | MTFLLHVLVTALSSHSTGRRGTNCFMLLSSGNHPIPCGSLTPYPHL* |
| 888 | 214 | 399 | MVYLPVSLNGLRLACFSYVLAPIKVKPGGGSETRDGFRIPESTPSLKAGYCDHKHF |
| | | | LPTIHL |
| 889 | 50 | 214 | MTLLNLYYLNSFLLYSKRFEGISFCVQKVSIILCIHYLRSTTIWNKLFFRDVSA* |
| 890 | 158 | 700 | MHFPVNCFFKSLHIFLLLQVFLATFLRKKLSKVAFSCLVEFFYYCYYFLDFASSVS |
| | | | FLFCFVLLLRQSLTLSPRLECSDTILAHCNLRLPGSRYSSASTSRVAGITGVHHHT |
| | | | YVTNFVWTVQKAVHCVGQASWELLTSRDPPTLASHRAGITGMSHRTWAKVFLKRVI |
| | | | FLNREYDLTMFCFL |
| 891 | 133 | 333 | MLVPTFLSLVCDFSLFVLLLLGCLSFLLPPHLPCTSFPLHLWRLLSPFISFLDLLL |
| | | | LLSYKMNCII* |
| 892 | 71 | 295 | MLPLFKHSPVRIFLFCLNTQHLSVRNNFVFNCVSPGILPISLCLAFNHDRSTFFFS |
| | | | IILLLKALIILSSLLQTK* |
| 893 | 95 | 331 | MKPILLVLSSITRALLLQISSVSWQSCMWRAMPDCLQTDYPISLGFHQRTRLLDAL |
| | | | CPVTQCHHSAWPCVCQGAQTPI* |
| 894 | 182 | 418 | MCCELLAVVIATLHKIGLVVLLYFIKLLIHIEFIKRHSILKCESIFNLNVGIRMYP |
| | | | GQVNFCETLQMLDGFGRIFQTK |
| 895 | 104 | 2683 | MACRWSTKESPRWRSALLLLFLAGVYGNGALAEHSENVHISGVSTACGETPEQIRA |
| | | | PSGIITSPGWPSEYPAKINCSWFIRANPGEIITISFQDFDIQGSRRCNLDWLTIET |
| | | | YKNIESYRACGSTIPPPYISSQDHIWIRFHSDDNISRKGFRIZAYFSGKSEEPNCA |
| | | | CDQFRCGNGKCIPEAWKCNNMDECGDRSDEEICAKEANPPTAAAFQPCAYNQFQCL |
| | | | CLPESLKCDGNIDCLDLGDEIDCDVPTCGQWLSRFTKVYTKYFYGTFNSPNYPDFY |
| | | | PPGSNCTWLIDTGDHRKVILRFTDFKLDGTGYGDYVKIYDGLEENPHKLLRVLTAF |
| | | | DSHAPLTVVSSSGQIRVHFCADKVNAARGFNATYQVDGFCLPWEIPCGGNWGCYTE |
| | | | QQRCDGYWHCPNGRDETNCTMCQKEEFPCSRNGVCYPRSDRCNYQNHCPNGSDEKN |
| | | | CFFCQPGNFHCKNNRCVFESWVCDSQDDCGDGSDEENCPVIVPTRVITAAVIGSLI |
| | | | CGLLLVIALGCTCKLYSLRMFERRSFETQLSRVEAELLRREAPPSYGQLIAQGLIP |
| | | | PVEDFPVCSPNQASVLENLRLAVRSQLGFTSVRLPMAGRSSNIWNRIFNFARSRHS |
| | | | GSLALVSADGDEVXTPSQSTSREPERNHTHRSLFSVESDDTDTENERRDMAGASGG |
| | | | VAAPLPQKVPPTTAVEATVGACASSSTQSTRGGHADNGRDVTSVEPPSVSPARHQL |
| | | | TSALSRMTQGLRWVRITLGRSSSLSQNQSPLRQLDNGVSGREDDDDVEMLIPISDG |
| | | | SSDFDVNDCSRPLLDLASDQGQGLRQPYNATNPGVRPSNRDGPCERCGIVHTAQIP |
| | | | DTCLEVTLKNETSDDEALLLC* |
| 896 | 230 | 391 | MSNRTRIRTHVNLCCFCRYTTPKMSFSSAGVSLCLMLLFCSPPLLLLLLSSFV* |
| 897 | 47 | 1147 | MASMAAVLTWALALLSAFSATQARKGFWDYFSQTSGDKGRVEQIHQQKMAREPATL |
| | | | KDSLEQDLNNMNKFLEKLRPLSGSEAPRLPQDPVGMRRQLQEELEEVKARLQPYMA |
| | | | EAHELVGWNLEGLRQQLKPYTMDLMEQVALRVQELQEQLRVVGEDTKAQLLGGVDE |
| | | | AWALLQGLQSRVVHHTGRFKELFHPYAESLVSGIGRHVQELHRSVAPHAPASPARL |
| | | | SRCVQVLSRKLTLKAKALHARIQQNLDQLREELSRAFAGTGTEEGAGPDPQMLSEE |
| | | | VRQRLQAFRQDTYLQIAAFTRAIDQETEEVQQQLAPPPPGHSAFAPEFQQTDSGKV |
| | | | LSKLQARLDDLWEDITHSLHDQGHSHLGDP* |
| 898 | 493 | 636 | MFIGLGISFLNCPSLFAHFILFCPLPLFGIFISYWFVRLLSINRGWK* |
| 899 | 92 | 1195 | MEFGLSWLFLVAILKGVQCEVQLVESGGGLVQPGGSLRLSCAASGFTFSSYAMSWV |
| | | | RQAPGKGLEWVSGFTGSGGSGGSTYYADSVKGRFTISRDNSKNTLFLQMNSLRAED |
| | | | TAVYYCAKGLLPPRWAYRVYEDSGIFFDYWGQGTLVTVSSSDIQMTQSPSTLSASV |
| | | | GDRVTITCRASQSISSWLAWYQQKPGKAPKLLIYKASSLQSGVPSRFSGSGSGTDF |
| | | | TLTISSLQPDDFATYYCQQLSTYVWTFGQGTKVDIKRTVAAPSVFIFPPSDEQLKS |
| | | | GTASVVCLLNNFYPREAKVQWKVDNALQSGNSQESVTEQDSKDSTYSLSSTLTLSK |
| | | | KADYEKHKVYACEVTHQGLSSPVTKSFNRGEC* |
| 900 | 948 | 1115 | MLCGNTQLLFTVAIILLYVTCLLHWTFLHLEWRVSEGRHHDPLSTTLMHEKMNDN |
| 901 | 722 | 84 | MYRLSSSMLLRALAQAMRTGHLIGQSLHSSAVAATYKYVNKKEQESEVDMKSETDN |
| | | | AARILMWTELIRGLGMTLRYLFREPATINYPFEKGPLSPRFRGEHALRRYPSGEER |
| | | | CIACKLCEAICPAQAITIEAEPRADGSRRTTRYDIDMTKCIYCGFCQEACPVDAIV |
| | | | EGPNFEFSTETHEELLYNKEKLLNNGDKWEAEIAANIQADYLYR* |
| 902 | 50 | 259 | MIELAFASFLKCASFSLLILFSFSFPLWFFLSCFACSYSFSCLLSRISILSPFCHL |
| | | | LPRQSHDLCTNDL* |
| 903 | 194 | 382 | MSVLIWCLIFFPLEYSRPKRGLKVDNVCFSTVALSTGSRISNWSNCETCLLAEMFF |
| | | | LDLGFS* |
| 904 | 44 | 1000 | MAAAAVSGALGRAGWRLLQLRCLPVARCRQALVPRAFHASAVGLRSSDEQKQQPPN |
| | | | SFSQQHSETQGAEKPDPESSHSPPRYTDQGGEEEEDYESEEQLQHRILTAALEFVP |
| | | | AHGWTAEAIAEGAQSLGLSSAAASMFGKDGSELILHFVTQCNTRLTRVLEEEQKLV |
| | | | QLGQAEKRKTDQFLRDAVETRLRMLIPYIEHWPRALSILMLPHNIPSSLSLLTSMV |
| | | | DDMWHYAGDQSTDFNWYTRRAMLAAIYNTTELVMMQDSSPDFEDTWRFLENRVNDA |
| | | | MNMGHTAKQVKSTGEALVQGLMGAAVTLKNLTGLNQRR* |
| 905 | 127 | 297 | MGHLLCVWGFTYILPCISLRHSPLQPPGWEGFCRNVSFPLLRASLAPHHRRKDGFI |
| | | | * |
| 906 | 233 | 484 | MHVLIRTPCSLILCLANSSHASLPGFSASSFLFKESCRLLLNSSFLLHGLEILSGA |
| | | | IAGQCNSFCLFSISQGSLSFNASCPLP* |
| 907 | 572 | 787 | MTLLWPHTAACLSVTLYLPASSAKYFKRGEGREKFITNPTTRKKKLFWRRGKRNHD |
| | | | QAFTGIPDQVSLFPF* |
| 908 | 259 | 552 | MYLHVLVLSHRILLSPYIPSFKSVPPPVFSILQMAPMSILDIDHPRSLGGDSSHFF |
| | | | SSVAQALTFCPFALRPFNNYSLQRPVFQKAPAFHHFLVKKF* |
| 909 | 99 | 371 | MFLVFCNIITVITMTSLFLILLSCIFILITCCYKCRYISFSFTFSVTPSGFFVSIL |
| | | | QYLAHILLLITLQFHFRVCYVNIITLIPLAQIFL* |
| 910 | 102 | 278 | MQLWGFLNLNFPCSSLCFWALGSRGFTLVLAVTPINSTGWAAHLPQHVKMRLFSIQ |
| | | | LF* |
| 911 | 142 | 360 | MLMVLKLVICSIFIGKEGHFVISYLPSFSLNIQDTLKSVHQPCSALSGYNMPEKPE |
| | | | ECSIKERHPYSQRLFLE |
| 912 | 191 | 481 | MGISCKLLLLTRVCYLITPLDLERFPFPNTEQVTFPERRVSVFLLPLSWCLDTRLP |
| | | | REPGCRCRHSSPQDVVGGSHLVTTTLLSLPAREFWTSCIL* |
| 913 | 256 | 393 | MILFHCEKLYALRSFDFWFMLELLSTWPRALGLLCPGLAIEAHEG* |
| 914 | 29 | 265 | MKTLKIFTYYFLSLSNIFILTIGLTCASGPLDFTPVFLLGKGSLKCKYGPVAHLPP |
| | | | EALESGPQIPSGCNWKEIPTSS* |
| 915 | 79 | 339 | MWLFCAWVSTWGQGCPPGRGQMIYASHHLSVHTTSPHHWLSAWALQGGAVFPELAH |
| | | | GASSASSGQADDSTCSFCSPWRVSAEHKSLT |
| 916 | 57 | 1163 | MWPALLLSHLLPLWPLLLLPLPPPAQDSSSSPRTPPAPARPPCARGGPSAPRHVCV |
| | | | WERAPPPSRSPRVPRSRRQVLPGTAPPATPSGFEEGPPSSQYPWAIVWGPTVSRED |
| | | | GGDPNSANPGFLDYGFAAPHGLATPHPNSDSMRGDGDGLILGEAPATLRPFLFGGR |
| | | | GEGVDPQLYVTITISIIIVLVATGIIFKFCWDRSQKRRRPSGQQGALRQEESQQPL |
| | | | TDLSPAGVTVLGAFGDSPTPTPDHEEPRGGPRPGMPHPKGAPAFQLNRSLSGQRFL |
| | | | HTLPLMCVSRPDVVVVCGVLTLSLMNTHPPRFRSPCMLLQRWVGGELGAPWALIGH |
| | | | GLVPFHTICFSVSPSYSKDAGITLRAPPWEMG* |
| 917 | 427 | 1461 | MDFLVLFLFYLASVLMGLVLICVCSKTHSLKGLARGGAQIFSCIIPECLQRAMHGL |
| | | | LHYLFHTRNHTFIVLHLVLQGMVYTEYTWEVFGYCQELELSLHYLLLPYLLLGVNL |
| | | | FFFTLTCGTNPGIITKANELLFLHVYEFDEVMFPKNVRCSTCDLRKPARSKHCSVC |
| | | | NWCVHRFDHHCVWVNNCIGAWNIRYFLIYVLTLTASAATVAIVSTTFLVHLVVMSD |
| | | | LYQETYIDDLGHLHVMDTVFLIQYLFLTFPRTVFMLGFVVVLSFLLGGYLLFVLYL |
| | | | AATNQTTNEWYRGDWAWCQRCPLVAWPPSAEPQVHRNIHSHGLRSNLQEIFLPAFP |
| | | | CHERKKQE* |
| 918 | 251 | 538 | MELVLVFLCSLLAPMVLASAAEKEKEMDPFHYDYQTLRIGGLVFAVVLFSVGILLI |
| | | | LSRRCKCSFNQKPRAPGDEEAQVENLITANATEPQKAEN* |
| 919 | 1355 | 1507 | MGRRKFLPPPLLSLLSSSLPLPICHPPAPLTPGLGIPPCGVVGREVFSVL* |
| 920 | 588 | 292 | MRAVLLQHLFILLDRQTTKKNSNLDIGHVFREALIFLADLKSQLPSVTHHQYRHLP |
| | | | SNWLQLLQCGQDKLHCCLSHARLGLAQDIHSQNGLRDALMLDF* |
| 921 | 588 | 292 | MRAVLLQHLFILLDRQTTKKNSNLDIGHVFREALIFLADLKSQLPSVTHHQYRHLP |
| | | | SNWLQLLQCGQDKHCCLSHARLGLAQDIHSQNGLRDALMLDF* |
| 922 | 288 | 1346 | MRSLGALLLLLSACLAVSAGPVPTPPDNIQVQENFNISRIYGKWYNLAIGSTCPWL |
| | | | KKIMDRMTVSTLVLGEGATEAEISMTSTRWRKGVCEETSGAYEKTDTDGKFLYHKS |
| | | | KWNITMESYVVHTNYDEYAIFLTKKFSRHHGPTITAKLYGRAPQLRETLLQDFRVV |
| | | | AQGVGIPEDSIFTMADRGECVPGEQEPEPILIPRVRRAVLPQEEEGSGGGQLVTEV |
| | | | TKKEDSCQLGYSAGPCMGMTSRYFYNGTSMACETFQYGGCMGNGNNFVTEKECLQT |
| | | | CRTVAACNLPIVRGPCRAFIQLWAFDAVKGKCVLFPYGGCQGNGNKFYSEKECREY |
| | | | CGVPGDGDEELLRFSN* |
| 923 | 510 | 1880 | MFLLLPFDSLIVNLLGISLTVLFTLLLVFHVPAIFGVSFGIRKLYMKSLLKIFAWA |
| | | | TLRMERGAKEKNHQLYKPYTNGIIAKDPTSLEEEIKEIRRSGSSKALDNTPEFELS |
| | | | DIFYFCRKGMETIMDDEVTKRFSAEELESWNLLSRTNYNFQYISLRLTVLWGLGVL |
| | | | IRYCFLLPLRIALAFTGISLLVVGTTVVGYLPNGRFKEFMSKHVHLMCYRICVRAL |
| | | | TAIITYHDRENRPRNGGICVANHTSPIDVIILASDGYYAMVGQVHGGLMGVIQRAM |
| | | | VKACPHVWFERSEVKDRHLVAKRLTEHVQDKSKLPILIFPEGTCINNTSVMMFKKG |
| | | | SFEIGATVYPVAIKYDPQFGDAFWNSSKYGMVTYLLRMMTSWAIVCSVWYLPPMTR |
| | | | EADEDAVQFANRVKSAIARQGGLVDLLWDGGLKREKVKDTFKEEQQKLYSKMIVGN |
| | | | HKDRSRS * |
| 924 | 56 | 1459 | MLLLLLLPLLWGRERVEGQKSNRKDYSLTMQSSVTVQEGMCVHVRCSFSYPVDSQT |
| | | | DSDPVHGYWFRAGNDISWKAPVATNNPAWAVQEETRDRFHLLGDPQTKNCTLSIRD |
| | | | ARMSDAGRYFFRMEKGNIKWNYKYDQLSVNVTALTHRPNILIPGTLESGCFQNLTC |
| | | | SVPWACEQGTPPMISWMGTSVSPLHPSTTRSSVLTLIPQPQHHGTSLTCQVTLPGA |
| | | | GVTTNRTIQLNVSYPPQNLTVTVFQGEGTASTALGNSSSLSVLEGQSLRLVCAVDS |
| | | | NPPARLSWTWRSLTLYPSQPSNPLVLELQVHLGDEGEFTCRAQNSLGSQHVSLNLS |
| | | | LQQEYTGKMRPVSGVLLGAVGGAGATALVFLSFCVIFIVVRSCRKKSARPAADVGD |
| | | | IGMKDANTIRGSASQGNLTESWADDNPRHHGLAAHSSGEEREIQYAPLSFHKGEPQ |
| | | | DLSGQEATNNEYSEIKIPK* |
| 925 | 56 | 1459 | MLLLLLLPLLWGRERVEGQKSNRKDYSLTMQSSVTVQEGMCVHVRCSFSYPVDSQT |
| | | | DSDPVHGYWFRAGNDISWKAPVATNNPAWAVQEETRDRFHLLGDPQTKNCTLSIRD |
| | | | ARMSDAGRYFFRMEKGNIKWNYKYDQLSVNVTALTHRPNILIPGTLESGCFQNLTC |
| | | | SVPWACEQGTPPMISWMGTSVSPLHPSTTRSSVLTLIPQPQHHGTSLTCQVTLPGA |
| | | | GVTTNRTIQLNVSYPPQNLTVTVFQGEGTASTALGNSSSLSVLEGQSLRLVCAVDS |
| | | | NPPARLSWTWRSLTLYPSQPSNPLVLELQVHLGDEGEFTCRAQNSLGSQHVSLNLS |
| | | | LQQEYTGKMRPVSGVLLGAVGGAGATALVFLSFCVIFIVVRSCRKKSARPAADVGD |
| | | | IGMKDANTIRGSASQGNLTESWADDNPRHHGLAAHSSGEEREIQYAPLSFHKGEPQ |
| | | | DLSGQEATNNEYSEIKIPK* |
| 926 | 167 | 403 | MRMLLTLGGLPQMCLKFHGTPLTCPQGVPCPHDSQRIQGIPKAPTGREFLAGPQRV |
| | | | PFPWLRSPAHVRGQPSPGGPTPG |
| 927 | 161 | 415 | MLCWKTTSGRLKDILAILLTDVLLLLQEKDQKYVFASVDSKPPVISLQKLIVREVA |
| | | | NEEKAMFMISASLQGPECIAAAREDPSKQ |
| 928 | 159 | 365 | MQQPEVKTWGGVVTAAMVIALAVYMGTGICGFLTFGAAVDPDVLLSYPSEDMAVAV |
| | | | ARALIILSVLTCI |
| 929 | 1377 | 1237 | MQMWWLGAQSAGRCWLRARTATSWWTCSWKRLVRGCCGRKTSSLVW* |
| 930 | 1524 | 1673 | MRNLSQRVTFRMVFAACSRYSRNMQPCCVLIFLKILLCLFYQSVGQFAN |
| 931 | 126 | 413 | MSLCLAFLLHWGHFRTCPLSHVEMHLYPKRCPQRNAESRWSPALVHCSRHIVQVSP |
| | | | SSSSIEAEGSRGSDFWGDGCLGRVLPPSIHVTSCSAETPA |
| 932 | 49 | 615 | MVPGAAGWCCLVLWLPACVAAHGFRIHDYLYFQVLSPGDIRYIFTATPAKDFGGIF |
| | | | HTRYEQIHLVPAEPPEACGELSNGFFIQDQIALVERGGCSFLSKTRVVQEHGGRAV |
| | | | IISDNAVDNDSFYVEMIQDSTQRTADIPALFLLGRDGYMIRRSLEQHGLPWAIISI |
| | | | PVNVTSIPTFELLQPPWTFW* |
| 933 | 1444 | 1632 | MACCLPCRAFPAYPTGVWPTTWLWCWAVLPIPWPASWPWVCCAGPWQGWAASLCWA |
| | | | CSVGAT* |
| 934 | 442 | 143 | MDWNLQFSLLLWATADISDQLFQPPQKFSWDPLESALCLYSSGSAKDLKGEMQSFW |
| | | | YPARKSPPLHLPALQLFYFGELPCKFLPALVVPGSTLPPSRPL* |
| 935 | 52 | 309 | MKITGGLLLLCTVVYFCSSSEAASLSPKKVDCSIYKKYPVVAIPCPITYLPVCGSD |
| | | | YITYGNECHLCTESLKSNQRVQFLHDGSC* |
| 936 | 26 | 1057 | MWAAAGGLWRSRAGLRALFRSRDAALFPGCERGLHCSAVSCKNWLKKFASKTKKKV |
| | | | WYESPSLGSHSTYKPSKLEFLMRSTSKKTRKEDHARLRALNGLLYKALTDLLCTPE |
| | | | VSQELYDLNVELSKVSLTPDFSACRAYWKTTLSAEQNAHMEAVLQRSAAHMRHLLM |
| | | | SQQTLRNVPPIVFVQDKGNAALAELDQLLAVADFGPRDERDNFVQNDFRDPDAPQP |
| | | | CGTTEPTTSSSLCGIDHEALNKQIMEYKRRKDKGLGGLVWQGQVAELTTQMQKGRK |
| | | | RAKPRLEQDSSLKSYLSGEEVEDDLDLVGAPEYECYAPDTEELEAERGGGRTEDGH |
| | | | SCGASRE* |
| 937 | 271 | 98 | MTAQHHSIAVLLLNLEVTCECMEYNKVFYSGSFASTSFLIGYCSSSSGFYFVQPSR |
| | | | P* |
| 938 | 140 | 370 | MLAHLSFERSLILHLIFSGIAVSIKALTKTWMPPEMGSSPVYKAFSLLQCRLSAQK |
| | | | WGSCHSQNTLHWPVWGPQTTL |
| 939 | 100 | 411 | MALLHICVGHPLLSFPKAGDFSFSSQDDPSELTAGAKDKEFSCLLVICLQPAPSTR |
| | | | SLFSWQLFLLSFSLVSFTLIYRGEFKKSGEAKDYLTQVQGPIDCGKLL |
| 940 | 111 | 386 | MFRSNPGFFFFCCCKSCILAISLGEIPRNEFTENMSLRESEDLKPDLSAFKSSALY |
| | | | TDVSSPVFFTYQNSRTLPEKPGRYCSTPVSGFSPG* |
| 941 | 92 | 328 | MCRLYSCARMPLFSTVLFSNVYINDFLLQKPENTTSQPLSNQRVVEVAIPHVGKFM |
| | | | IESKEGGYDDEVPFTALCTIAT* |
| 942 | 143 | 481 | MGIQWTCEWPSSLSPGWKFIACLWFSMWGSRPPLSQAMSHKQWPMLCSSISNPEAS |
| | | | GTELFTYHYHMMGYIERFWPTEELAQRCSLHKELPCTVFTEKHCSCTFLMVFGVCT |
| | | | * |
| 943 | 956 | 1558 | MQGMKTQLIQLSTLLRLLDSGFCSYLESQDSGYLYFCFRWLLIRFKREFSFLDILR |
| | | | LWEVMWTELPCTNFHLLLCCAILESEKQQIMEKHYGFNEILKHINELSMKIDVEDI |
| | | | LCKAEAISLQMVKCKELPQAVCEILGLQGSEVTTPDSDVGEDENVVMTPCPTSAFQ |
| | | | SNALPTLSASGARNDSPTQIPVSSDVCRLTPA* |
| 944 | 23 | 319 | MGASLALGFTEVVLVLGFTVKLGAHLTLLPPLGGHLSPYCAAQAWEGVKQLMCNCS |
| | | | SYPLQCIICCIYATPGCYNLSFGILSSCEGIFVYEWLFEMLL* |

1. An isolated polynucleotide comprising a nucleotide sequence selected from the group consisting of SEQ ID NO:1-236. and 473-708, a mature protein coding portion of SEQ ID NO:1-236 and 473-708, active domain coding portion of SEQ ID NO:1-236 and 473-708, and complementary sequences thereof.

2. An isolated polynucleotide encoding a polypeptide with biological activity, wherein said polynucleotide hybridizes to the polynucleotide of claim 1 under stringent hybridization conditions.

3. An isolated polynucleotide encoding a polypeptide with biological activity, wherein said polynucleotide has greater than about 90% sequence identity with the polynucleotide of claim 1.

4. The polynucleotide of claim 1 wherein said polynucleotide is DNA.

5. An isolated polynucleotide of claim I wherein said polynucleotide comprises the complementary sequences.

6. A vector comprising the polynucleotide of claim 1.

7. An expression vector comprising the polynucleotide of claim 1.

8. A host cell genetically engineered to comprise the polynucleotide of claim 1.

9. A host cell genetically engineered to comprise the polynucleotide of claim 1 operatively associated with a regulatory sequence that modulates expression of the polynucleotide in the host cell.

10. An isolated polypeptide, wherein the polypeptide is selected from the group consisting of:
(a) a polypeptide encoded by any one of the polynucleotides of claim 1; and
(b) a polypeptide encoded by a polynucleotide hybridizing under stringent conditions with any one of SEQ ID NO:1-236 and 473-708.

11. A composition comprising the polypeptide of claim 10 and a carrier.

12. An antibody directed against the polypeptide of claim 10.

13. A method for detecting the polynucleotide of claim 1 in a sample, comprising:
a) contacting the sample with a compound that binds to and forms a complex with the polynucleotide of claim I for a period sufficient to form the complex; and
b) detecting the complex, so that if a complex is detected, the polynucleotide of claim 1 is detected.

14. A method for detecting the polynucleotide of claim 1 in a sample, comprising:
a) contacting the sample under stringent hybridization conditions with nucleic acid primers that anneal to the polynucleotide of claim 1 under such conditions;
b) amplifying a product comprising at least a portion of the polynucleotide of claim 1; and
c) detecting said product and thereby the polynucleotide of claim 1 in the sample.

15. The method of claim 14, wherein the polynucleotide is an RNA molecule and the method further comprises reverse transcribing an annealed RNA molecule into a cDNA polynucleotide.

16. A method for detecting the polypeptide of claim 10 in a sample, comprising:
a) contacting the sample with a compound that binds to and forms a complex with the polypeptide under conditions and for a period sufficient to form the complex; and
b) detecting formation of the complex, so that if a complex formation is detected, the polypeptide of claim 10 is detected.

17. A method for identifying a compound that binds to the polypeptide of claim 10, comprising:
a) contacting the compound with the polypeptide of claim 10 under conditions sufficient to form a polypeptide/compound complex; and
b) detecting the complex, so that if the polypeptide/compound complex is detected, a compound that binds to the polypeptide of claim 10 is identified.

18. A method for identifying a compound that binds to the polypeptide of claim 10, comprising:
a) contacting the compound with the polypeptide of claim 10; in a cell, under conditions sufficient to form a polypeptide/compound complex, wherein the complex drives expression of a reporter gene sequence in the cell; and
b) detecting the complex by detecting reporter gene sequence expression, so that if the polypeptide/compound complex is detected, a compound that binds to the polypeptide of claim 10 is identified.

19. A method of producing the polypeptide of claim 10, comprising, a) culturing a host cell comprising a polynucleotide sequence selected from the group consisting of a polynucleotide sequence of SEQ ID NO:1-236 and 473-708, a mature protein coding portion of SEQ ID NO:1-236 and 473-708, an active domain coding portion of SEQ ID NO:1-236 and 473-708, complementary sequences thereof and a potynucleotide sequence hybridizing under stringent conditions to SEQ ID NO:1-236 and 473-708, under conditions sufficient to express the polypeptide in said cell; and
b) isolating the polypeptide from the cell culture or cells of step (a).

20. An isolated polypeptide comprising an amino acid sequence selected from the group consisting of any one of the polypeptides SEQ ID NO:237-472 and 709-944, the mature protein portion thereof, or the active domain thereof.

21. The polypeptide of claim 20 wherein the polypeptide is provided on a polypeptide array.

22. A collection of polynucleotides, wherein the collection comprising the sequence information of at least one of SEQ ID NO: 1-236 and 473-708.

23. The collection of claim 22, wherein the collection is provided on a nucleic acid array.

24. The collection of claim 23, wherein the array detects full-matches to any one of the polynucleotides in the collection.

25. The collection of claim 23, wherein the array detects mismatches to any one of the polynucleotides in the collection.

26. The collection of claim 22, wherein the collection is provided in a computer-readable format.

27. A method of treatment comprising administering to a mammalian subject in need thereof a therapeutic amount of a composition comprising a polypeptide of claim 10 or 20 and a pharmaceutically acceptable carrier.

28. A method of treatment comprising administering to a mammalian subject in need thereof a therapeutic amount of a composition comprising an antibody that specifically binds to a polypeptide of claim 10 or 20 and a pharmaceutically acceptable carrier.

The application's sequence listing, which the Patent Office published only in electronic form, follows.

SEQUENCE LISTING (944 sequences)

SEQ ID NO: 1 - DNA, 2226 bp, Homo sapiens
  CDS (110)..(1516)
taagcttgcggccgcggaaggggagcagctgagaaaggagggccgctgcaggcggggttcgaaccgtggggtctgggctgctcccgcggagggcctgggcggacgcgggatgctgggggtccgctgcctgctgcggtccgtgcgcttctgttcctccgcccccttccccaagcacaaaccttcagccaaactgagcgtgcgggacgctctcggggctcagaacgcgagtggggagcgcattaagatccagggatggattcgttctgtccgatcccagaaggaagtcttgttcctgcatgtaaatgatgggtcatctttggaaagccttcaggttgttgcagattcaggccttgacagtagagaattaacttttgggagttctgtggaagtacaagggcagctgataaaaagtccatccaaaaggcaaaatgtggaactgaaggcagaaaaaattaaagttattggaaattgtgatgccaaggatttccccatcaaatataaagagaggcatcctctggagtacctgcgacaatatcctcactttaggtgtaggactaacgttctgggttctatattgaggattcgcagtgaagcgacagctgctattcattctttctttaaggacagtggctttgtacatattcatactccaataatcacatccaatgactctgagggagctggagaactttttcaacttgaaccttcaggcaaacttaaggtacctgaggagaatttcttcaatgttcctgctttcttaactgtctcaggacaacttcatctagaagtgatgtcaggagcttttactcaagtgtttacctttggtccgaccttccgagctgaaaattctcagagccggaggcacctggcagagttttatatgatagaagcagagatttcttttgttgacagccttcaagatcttatgcaggttatagaggaactgttcaaggctacaacaatgatggttctctcaaaatgtcctgaagatgttgaactctgtcacaaattcatagcacctggccaaaaggacagattagaacatatgctaaaaaacaactttttaatcatttcttatactgaagcagtggagatcttaaagcaagcatcccagaacttcacctttaccccagagtggggtgctgacctacggactgaacatgaaaagtacctggtgaagcactgtggcaacatacctgtcttcgttattaattatccattaacactcaagcctttctacatgagggataatgaagatggccctcagcacacggttgctgctgttgatcttctggttcctggagttggggaactctttggaggaggcctcagagaagaacgataccatttcttagaggagcgcttagccaggtatctggaccttcgtcgatttggatctgtgccacatggaggttttgggatgggatttgaacgctacctgcagtgcatcttgggtgttgacaatatcaaagatgttatccctttcccaaggtttcctcattcatgccttttatagctggaagattggttaaggaaaagcaccccccatggcagagacactgcacatgattgtgcatacagcagaatgcatgtttggattttagaaatgcagatttcaatatgtaattgttgtgccataagatatcatagaaaaaatataagtggttgtgattttcttagaaagttgagggtatttcacgtaaggatgagctcccgcaagaagaggtacttatagcaaggggactctcaaatccattacctcaattaagaaatgaagaaattgaattagtctcaaagtttcttttaaactctaaaacagaatgagataatgtattttacgttgtctataatcattaaatcactccctgtgtaatttgtgagaaccatctagtagctcgaaataaaataatgttgcatcttttctcccttgccatatactttgtgataaatccttatctcattttcagtacttcattaaacattgcagaaaaaaatattccttaaggtcttaattgatttaaagaagtagctattctgaattgaaatctcctttcattgaactggatgaaaaaatcatgtttaataactgttgcttttcaattttcaaagctgttgagatattacattaagtatttcaactctttaatcactgttgttataatttgtttatatttgatgtttataatttgtctaataaaatagatttttttaatagaaaaaaaaaaa

SEQ ID NO: 2 - DNA, 1992 bp, Homo sapiens
  CDS (102)..(1727)
atcgaacgtatgcggtaccggtccggaattcccgggtcgacccacgcgtccgaacggagtggcggcggcatttcctggtgtctgagcctggcgcggaggctatgggcagccaggaggtgctgggccacgcggcccggctggcctcctccggtctcctcctgcaggtgttgtttcggttgatcacctttgtcttgaatgcatttattcttcgcttcctgtcaaaggaaatcgttggcgtagtaaatgtaagactaacgctgctttactcaaccaccctcttcctggccagagaggccttccgcagagcatgtctcagtgggggcacccagcgagactggagccagaccctcaacctgctgtggctaacagtccccctgggtgtgttttggtccttattcctgggctggatctggttgcagctgcttgaagtgcctgatcctaatgttgtccctcactatgcaactggagtggtgctgtttggtctctcggcagtggtggagcttctaggagagcccttttgggtcttggcacaagcacatatgtttgtgaagctcaaggtgattgcagagagcctgtcggtaattcttaagagcgttctgacagcttttctcgtgctgtggttgcctcactggggattgtacattttctctttggcccagcttttctataccacagttctggtgctctgctatgttatttatttcacaaagttactgggttccccagaatcaaccaagcttcaaactcttcctgtctccagaataacagatctgttacccaatattacaagaaatggagcgtttataaactggaaagaggctaaactgacttggagttttttcaaacagtctttcttgaaacagattttgacagaaggcgagcgatatgtgatgacatttttgaatgtattgaactttggtgatcagggtgtgtatgatatagtgaataatcttggctcccttgtggccagattaattttccagccaatagaggaaagtttttatatattttttgctaaagtgctggagaggggaaaggatgccacacttcagaagcaggaggacgttgctgtggctgctgcagtcttggagtccctgctcaagctggccctgctggccggcctgaccatcactgtttttggctttgcctattctcagctggctctggatatctacggagggaccatgcttagctcaggatccggtcctgttttgctgcgttcctactgtctctatgttctcctgcttgccatcaatggagtgacagagtgtttcacatttgctgccatgagcaaagaggaggtcgacaggtacaattttgtgatgctggccctgtcctcctcattcctggtgttatcctatctcttgacccgttggtgtggcagcgtgggcttcatcttggccaactgctttaacatgggcattcggatcacgcagagcctttgcttcatccaccgctactaccgaaggagcccccacaggcccctggctggcctgcacctatcgccagtcctgctcgggacatttgccctcagtggtggggttactgctgtttcggaggtattcctctgctgtgagcagggctggccagccagactggcacacattgctgtgggggccttctgtctgggagcaactctcgggacagcattcctcacagagaccaagctgatccatttcctcaggactcagttaggtgtgcccagacgcactgacaaaatgacgtgacttcagggaagcctggacacccgaggcacctggaccagctatgggtagttctgtgggtggaacacattctgtgtaagagccccactgagggctctgcagcggagtgacagcaaccccagagatgaggcaccagagagtgccactgcatgagacacctgtgaccattcgaagtctgaaatgcggggggggagtttcatttttaagtgaagaccaaaagccctttaaaaataatagttttttatcattttatagtaaaaaaaaaaaa

SEQ ID NO: 3 - DNA, 1279 bp, Homo sapiens
  CDS (81)..(911)
attgaacgcctgcggtaccggtccggaattcccgggtcgacccacgcgtccgggtgagaagcgcagtcgggggcacggggatgagctcaggggcctctagaaagagctgggaccctgggaagccctggcctccagactggccaatcacaggcaggaagatgaaggttctgtgggctgcgttgctggtcacattcctggcaggatgccaggccaaggtggagcaagcggtggagacagagccggagcccgagctgcgccagcagaccgagtggcagagcggccagcgctgggaactggcactgggtcgcttttgggattacctgcgctgggtgcagacactgtctgagcaggtgcaggaggagctgctcagctcccaggtcacccaggaactgagggcgctgatggacgagaccatgaaggagttgaaggcctacaaatcggaactggaggaacaactgaccccggtggcggaggagacgcgggcacggctgtccaaggagctgcaggcggcgcaggcccggctgggcgcggacatggaggacgtgtgcggccgcctggtgcagtaccgcggcgaggtgcaggccatgctcggccagagcaccgaggagctgcgggtgcgcctcgcctcccacctgcgcaagctgcgtaagcggctcctccgcgatgccgatgacctgcagaagcgcctggcagtgtaccaggccggggcccgcgagggcgccgagcgcggcctcagcgccatccgcgagcgcctggggcccctggtggaacagggcccgcgtgcgggccgccactgtgggctccctgggccggccagccgctacaggagcgggcccaggcctggggcgagcggctgcgcgcgcggatggaggagatgggcagccggacccgcgaccgcctggacgaggtgaaggagccaggtgggcggaggtgcgcgccaagctggaggagcaggcccagcagatacgcctgcaggccgaggccttccaggcccgcctcaagaggctggttcgagcccctggtggaagacatgcagcggccagtggggcccgggctggtggagaaggtgcaggctgccgtgggcaccagcgccgcccctgtgcccagcgacaatcactgaacgccgaagcctgcagccatgcgaccccacgccaccccgtgcctcctgcctccgcgcagcctgcagcgggagaccctgtccccgcccccagccgtcctgcctggggtggacccctagtttaataaagattcaccaagtttcacgccagaaaaaaaaaaa

SEQ ID NO: 4 - DNA, 2761 bp, Homo sapiens
  CDS (860)..(2521)
tttttaatatggagtctcagtcgcttgccagtctgaagtgcagtggtgcagtctcggctcactgcaacctctgcttcctgggttcaagcaattctcctgcctcagcctcccgagtaagtgggattacaggggtgctctaccacacctggctaatttttgtatttttagtacagacagggtttcaccatgttggtcaggctggcctcgaactcctgacctcgtgatccacccgcctcggcctcccaaagtgctgggattacaggcatgagccactgcgccaggcctaactccatgtagtatcaactaatcttctcttctgattcttgtaccaactgcatcttttcttttaattccttctgatctttggcatactgttcaaatactggttgaaaaatatatactcctccagcaattccaaggacagtggcaaaaagcagttgtgcaaaagtcaatctcctaaacattgctgcaacaaatacagctcaaggaaaagctggttttggaaagtcacactccacacccaggaaatctcttcaaatctccgactgttctgcgcctgctccacgtcactaaactcgctaccgcctgctcccctccagagaccgggggccttccagcagttttcggacccccgagcacagagaccgccaagccaaaggcgagtagcaatccctcggttcggaaacggcgaaaggaaaccgcaaggaggccaccacgtcgggtgggagctacgaagttgcccgttcccggttacttccgggcttgcgagcgacgactgctctcaaaggccaaacttaatggatggacgagcagcgcgctactgcagctttcttccgccttaggaaggtggcggccagggatgaggaggcccctaagcaagtgcggaatggagccggggggcggagatgccagcctcactttgcatggtctccagaaccgctcccacggcaagataaagctgcgaaagagaaagtctaccttgtacttcaacacccaggagaagagcgccaggcgccgcggggatcttcttggagaaaatatttatctgctcttgtttaccatagctttacgaatattaaactgctttttagtgcagacaagttttgttccagatgaatactggcagtctcttgaagtttcacatcacatggttttcaattatggttatttgacttgggaatggacagagagactgaggagttacacttatcccttaatctttgcaagcatttacaagattcttcatcttttagggaaagatagtgttcagttgctgatttggattcctagacttgcccaagcacttctgtctgctgtagcagatgtgagactttactcattaatgaagcaactagaaaatcaggaagtggcaagatgggtgtttttttgccagttgtgctcctggttcacatggtattgctgtaccagaacccttacaaacaccatggaaactgttctcactataattgctcttttctactatcctttggaaggttcaaagtctatgaacagtgtcaaatactcatccctggtggcacttgccttcataattcgtcccacagctgtcattctgtggacacctttgctcttcagacatttctgtcaagaaccaagaaagcttgatcttattctacatcattttttacctgtaggctttgttactttgagtttgtctctgatgattgatcgtattttttttggccaatggactctggttcaatttaattttttgaaatttaacgtgctgcagaactggggaacattttatggttctcatccatggcactggtacttcagtcaaggatttccagttatcttgggtactcacttacccttctttattcatggctgctatctagcaccaaagagataccggatacttttggtgactgtgctgtggacactgcttgtttatagcatgttgagccacaaagaattcaggtttatttatccagttttaccattctgtatggtgttctgtggatactcattaacccacctgaaaacatggaagaaaccagctctaagtttcctgtttttatcaaatttgttcctcgccctttatactggtttagttcatcaacgaggtactcttgatgtcatgagtcatattcaaaaagtttgttacaacaatcccaataaatcttcagcttcaatatttataatgatgccttgccactctactccttattacagccatgttcactgcccacttcccatgagatttctccagtgcccgccagacctgactggaaaaagtcattatcttgatgaagcagatgtattttacctaaatcccttaaactggttacatagagagtttcatgatgatgcatcattgcctactcacttgatcaccttcagcattttggaagaggaaataagcgctttcctaatttcaagcaattataaaagaactgctgttttcttccacactcacttgccagagggtcgaattggaagtcacatatatgtctatgaacggaagttaaaagggaaattcaacatgaagatgaaattctgaactttcctagataaattaacattgctgggtggaaatattcagatgctgcttaaatacttcggtaaacactgggtaagattcatggaacttagaaaaaagctgtatgaactgctttaccaaatatcactactgaggaaatgtataaaataccacatagtataaaattacatgttaatacaatgccagattttaaataaagacctttagttttcctcacagaaaaaagaaaaaaaaaaa

SEQ ID NO: 5 - DNA, 1260 bp, Homo sapiens
  CDS (63)..(1160)
tcactgccgtaccgctccggaattcccgggtcgacgatttcgtccgaaagatctccatctgcatgtcgctgctgggcttcctgctctcccgcctcgggctgctgctcaaggtgctgctggactggccagtggaggtgctgtacggggcggcggcgctgaacgggctattcggcggcttctccgccttctggtccggggtcatggcgctgggatcgctgggctcctccgagggccgccgctctgtgcgcctcatcctcattgacctgatgctgggcttggcggggttctgcgggagcatggcttccgggcatctcttcaagcagatggctgggcactctgggcagggcctgatactgacggcctgcagcgtgagctgtgcctcgtttgccctgctctacagccttttggtgctaaaggtccctgagtcggtggccaaacccagccaggagctccccgccgtggataccgtgtctggcacggttggcacataccgcactctggatcctgatcagttggaccaacagtatgcagtggggcaccctccatctcctggaaaagcaaaaccccataaaaccaccattgccttgctctttgtgggtgctatcatatatgacctggcggtggtgggcacagtggacgtgatccctctttttgtgctgagggagcctctcggttggaaccaagtgcaggtgggctatggtatggctgcagggtacaccatcttcatcaccagcttcctgggtgtcctggtcttctcccgctgctttcgggacaccaccatgatcatgattgggatggtctcctttgggtcaggagccctcctcttggcttttgtgaaagagacatacatgttctatattgctcgagccgtcatgctgtttgctctcatccccgtcacaaccatccgatcagctatgtccaaactcataaagggctcctcttatggaaaggtgttcgtcatactgcagctgtccttggctctgaccggcgtggtgacatccaccttgtacaacaagatctaccagctcaccatggacatgtttgtgggctcctgctttgctctctcctcctttctctccttcctggccatcattccaattagcatcgtggcctataaacaagtcccattgtcaccatatggagacatcatagagaaatgaagatgcttacctgcaggaactgaaaacatcagccatggccaggcccccagaagacaaaagaagggaccggggaactggtgacctaagcaacccactgctt

SEQ ID NO: 6 - DNA, 891 bp, Homo sapiens
  CDS (39)..(782)
catgctgctgacgaattcggcacgagaccctgaagaggatgttcctgttcctgttcttcctggtggccatcctaccagtcaacactgaaggaggagagatcatatggggtacagagtccaaaccccactcccggccctacatggcattcataaagttttatgatagtaattcagaaccccatcactgtggcggtttcctggtggcaaaagacatcgtaatgacagcagctcactgtaatggaagaaatataaaagtaaccttaggtgctcacaatatcaagaaacaagaaaacacccaggttatctctgttgtaaaagccaaacctcacgagaactatgacagagattcacattttaatgacatcatgctcctgaagttggaacgcaaagctcaactcaatggtgttgtgaagactattgcccttcctaggagccaggactgggtgaaacctgggcaggtgtgcacagtggcaggttggggacgcttggccaattgtacttcgtctaacacacttcaagaagtgaatctagaagttcagaaaggccagaagtgccaagacatgtccgaagactacaacgactccatccagctttgtgtgggaaaccccagcgaggggaaggctactggtaagggagactcagggggtccctttgtgtgcgatggaatggccccagggcattggcagttatcggcttgggtactgggaacactttctcgagaatttccccagaatctccagcttttataccggggatttagaaaaccaatgaaaggcccttaacaattcctagaaacccaaaaccctgggtcttgcggccaatggccccaccatccctgggggaatggggttaatttgagggcctcaaaaaagaaaacccttttcccgcccg

SEQ ID NO: 7 - DNA, 4770 bp, Homo sapiens
  CDS (140)..(4531)
aagctggtacgcctgcaggtaccggtccggaattcccgggtcgacccacgcgtccgggcacgcggagtgtgaggccacgcatgagcggacgctaaccccctccccagccacaaagagtctacatgtctagggtctagacatgttcagctttgtggacctccggctcctgctcctcttagcggccaccgccctcctgacgcacggccaagaggaaggccaagtcgagggccaagacgaagacatcccaccaatcacctgcgtacagaacggcctcaggtaccatgaccgagacgtgtggaaacccgagccctgccggatctgcgtctgcgacaacggcaaggtgttgtgcgatgacgtgatctgtgacgagaccaagaactgccccggcgccgaagtccccgagggcgagtgctgtcccgtctgccccgacggctcagagtcacccaccgaccaagaaaccaccggcgtcgagggacccaagggagacactggcccccgaggcccaaggggacccgcaggcccccctggccgagatggcatccctggacagcctggacttcccggaccccccggaccccccggacctcccggaccccctggcctcggaggaaactttgctccccagctgtcttatggctatgatgagaaatcaaccggaggaatttccgtgcctggccccatgggtccctctggtcctcgtggtctccctggcccccctggtgcacctggtccccaaggcttccaaggtccccctggtgagcctggcgagcctggagcttcaggtcccatgggtccccgaggtcccccaggtccccctggaaagaatggagatgatggggaagctggaaaacctggtcgtcctggtgagcgtgggcctcctgggcctcagggtgctcgaggattgcccggaacagctggcctccctggaatgaagggacacagaggtttcagtggtttggatggtgccaagggagatgctggtcctgctggtcctaagggtgagcctggcagccctggtgaaaatggagctcctggtcagatgggcccccgtggcctgcctggtgagagaggtcgccctggagcccctggccctgctggtgctcgtggaaatgatggtgctactggtgctgccgggccccctggtcccaccggccccgctggtcctcctggcttccctggtgctgttggtgctaagggtgaagctggtccccaagggccccgaggctctgaaggtccccagggtgtgcgtggtgagcctggcccccctggccctgctggtgctgctggccctgctggaaaccctggtgctgatggacagcctggtgctaaaggtgccaatggtgctcctggtattgctggtgctcctggcttccctggtgcccgaggcccctctggaccccagggccccggcggccctcctggtcccaagggtaacagcggtgaacctggtgctcctggcagcaaaggagacactggtgctaagggagagcctggccctgttggtgttcaaggaccccctggccctgctggagaggaaggaaagcgaggagctcgaggtgaacccggacccactggcctgcccggaccccctggcgagcgtggtggacctggtagccgtggtttccctggcgcagatggtgttgctggtcccaagggtcccgctggtgaacgtggttctcctggccctgctggccccaaaggatctcctggtgaagctggtcgtcccggtgaagctggtctgcctggtgccaagggtctgactggaagccctggcagccctggtcctgatggcaaaactggcccccctggtcccgccggtcaagatggtcgccccggacccccaggcccacctggtgcccgtggtcaggctggtgtgatgggattccctggacctaaaggtgctgctggagagcccggcaaggctggagagcgaggtgttcccggaccccctggcgctgtcggtcctgctggcaaagatggagaggctggagctcagggaccccctggccctgctggtcccgctggcgagagaggtgaacaaggccctgctggctcccccggattccagggtctccctggtcctgctggtcctccaggtgaagcaggcaaacctggtgaacagggtgttcctggagaccttggcgcccctggcccctctggagcaagaggcgagagaggtttccctggcgagcgtggtgtgcaaggtccccctggtcctgctggtccccgaggggccaacggtgctcccggcaacgatggtgctaagggtgatgctggtgcccctggagctcccggtagccagggcgcccctggccttcagggaatgcctggtgaacgtggtgcagctggtcttccagggcctaagggtgacagaggtgatgctggtcccaaaggtgctgatggctctcctggcaaagatggcgtccgtggtctgaccggccccattggtcctcctggccctgctggtgcccctggtgacaagggtgaaagtggtcccagcggccctgctggtcccactggagctcgtggtgcccccggagaccgtggtgagcctggtccccccggccctgctggctttgctggcccccctggtgctgacggccaacctggtgctaaaggcgaacctggtgatgctggtgctaaaggcgatgctggtccccctggccctgccggacccgctggaccccctggccccattggtaatgttggtgctcctggagccaaaggtgctcgcggcagcgctggtccccctggtgctactggtttccctggtgctgctggccgagtcggtcctcctggcccctctggaaatgctggaccccctggccctcctggtcctgctggcaaagaaggcggcaaaggtccccgtggtgagactggccctgctggacgtcctggtgaagttggtccccctggtccccctggccctgctggcgagaaaggatcccctggtgctgatggtcctgctggtgctcctggtactcccgggcctcaaggtattgctggacagcgtggtgtggtcggcctgcctggtcagagaggagagagaggcttccctggtcttcctggcccctctggtgaacctggcaaacaaggtccctctggagcaagtggtgaacgtggtccccctggtcccatgggcccccctggattggctggaccccctggtgaatctggacgtgagggggctcctggtgccgaaggttcccctggacgagacggttctcctggcgccaagggtgaccgtggtgagaccggccccgctggaccccctggtgctcctggtgctcctggtgcccctggccccgttggccctgctggcaagagtggtgatcgtggtgagactggtcctgctggtcccgccggtcctgtcggccctgttggcgcccgtggccccgccggaccccaaggcccccgtggtgacaagggtgagacaggcgaacagggcgacagaggcataaagggtcaccgtggcttctctggcctccagggtccccctggccctcctggctctcctggtgaacaaggtccctctggagcctctggtcctgctggtccccgaggtccccctggctctgctggtgctcctggcaaagatggactcaacggtctccctggccccattgggccccctggtcctcgcggtcgcactggtgatgctggtcctgttggtccccccggccctcctggacctcctggtccccctggtcctcccagcgctggtttcgacttcagcttcctgccccagccacctcaagagaaggctcacgatggtggccgctactaccgggctgatgatgccaatgtggttcgtgaccgtgacctcgaggtggacaccaccctcaagagcctgagccagcagatcgagaacatccggagcccagagggcagccgcaagaaccccgcccgcacctgccgtgacctcaagatgtgccactctgactggaagagtggagagtactggattgaccccaaccaaggctgcaacctggatgccatcaaagtcttctgcaacatggagactggtgagacctgcgtgtaccccactcagcccagtgtggcccagaagaactggtacatcagcaagaaccccaaggacaagaggcatgtctggttcggcgagagcatgaccgatggattccagttcgagtatggcggccagggctccgaccctgccgatgtggccatccagctgaccttcctgcgcctgatgtccaccgaggcctcccagaacatcacctaccactgcaagaacagcgtggcctacatggaccagcagactggcaacctcaagaaggccctgctcctccagggctccaacgagatcgagatccgcgccgagggcaacagccgcttcacctacagcgtcactgtcgatggctgcacgagtcacaccggagcctggggcaagacagtgattgaatacaaaaccaccaagacctcccgcctgcccatcatcgatgtggcccccttggacgttggtgccccagaccaggaattcggcttcgacgttggccctgtctgcttcctgtaaactccctccatcccaacctggctccctcccacccaaccaactttccccccaacccggaaacagacaagcaacccaaactgaacccccccaaaagccaaaaaatgggagacaatttcacatggactttggaaaatatttttttcctttgcattcatctctcaaacttagtttttatctttgaccaaccgaacatgaccaaaaaccaaaagtgcattcaaccttaccaaaaaaaaaaa

SEQ ID NO: 8 - DNA, 3331 bp, Homo sapiens
  CDS (630)..(1553)
atgcggatcctgagagcgatcccaggtaagcaattgccccggtggaacgccttgccagagcagcatgtggcaggcccccatggaggatcaacgcagtggctgaacaccaggaaggaactggcacttggagtccagacatctgaaacttgggccttagaactgatgacccagtacgttaacaactggaactgggtctacgacaacataatagatcaggatgaaagcgaattgactgggttgttaggaaatactcaagaactcagcccagctctagaactcacctctgagcatgaaggcaatgttgggcacgctggtaaaggaccactagaatccagcagctcggacccctttctttgtgctcgggaaaaggggtgcaggactgctacatcgcccatctcagtggtcgcggaaggtgacgtggacacggaagtggtcgtcgtcgcggcaccggtgggagctaggcgcgaggctcggagtgcggccagcgggcggaggcggtctcgcatcggcggcgacggagggctcaggcgtcgtcgtttgggtggggggccgctgaactgacaagcgacatttcagctcctttcacccgccggaaccccggagccggggcccgctcagccggcgttaccatgaccaaggccggtagcaagggcgggaacctccgcgacaagctggacggcaacgaactggacctgagcctcagcgacctgaatgaggtcccggtgaaggagctggctgcccttccaaaggccaccatcctggatctgtcttgtaataaactgactactctaccgtcggatttctgtggcctcacacacctggtgaagctagacctgagtaagaacaagctgcagcagctgccagcagactttggccgtctggtcaacctccagcacctggatctcctcaacaacaagctggtcaccttgcctgtcagctttgctcagctcaagaacctgaagtggttggacctgaaggataaccccctggatcctgtcctggccaaggtggcaggtgactgcttggatgagaagcagtgtaagcagtgtgcaaacaaggtgttacagcacatgaaggccgtgcaggcagatcaggagcgggagaggcagcggcggctggaagtagaacgtgaggcagagaagaagcgtgaggctaagcagcgagctaaggaagctcaggagcgggaactgcggaagcgggagaaggcggaagagaaggagcgccggagaaaggagtatgatgccctcaaagcagtcaagcgggagcaggagaagaaacctaagaaggaagcaaatcaggccccgaaatctaagtctggctcccgtccccgcaagccaccaccccggaagcacactcgttcctgggctgtgctgaagctgctgctgctgctgctgctatttggtgtggcgggagggctggttgcttgtcgggtgacagagctgcagcagcagcccctctgcaccagcgtgaacaccatctatgacaatgcggtccagggtctacgccgccatgagatcctccagtgggtcctccagaccgactctcagcagtgagcttgtccccagcacctgctgcctcccagccttggagtttggattcctatggaattgggttctgctggacacaacctctttttagcatcagacctacctgccatcatcaaatggctgcagattggtacatgagacctcctctttgtaggacttcttcattccttagtcagggttccctgaaggaatgaggagaaatgggaggtggcgggggggcgtggggggcagttacctgcatgcctaaaggagtaggcttgggggtggggagagagaaaacatagccttttctagttgttatataaagctgtgtaaaggcaaggctcgtttctactaaatggtcagctgtcactacatttatacttttgtatgccacaaaccctttcattcctccctgggaatcagggtagatcaggaggaactgggggggactagaacaccacgctcagtaaatccagtctaaactgggaggtaggggtattcctgttttctttaggacctcagagatgtaagcattttagcagccacacaaaatctctggctatgaaagggacttcatgaccatccagtccaatataacacttgcagacagagaaactgaggtcttccatgacttgcctagtctcccagctagtttgaggcaaaactggattcccactctggtattctttcttccctttacatcattttccctcctttataatgtcctgagagaccagaactcacaccagaatcgattattcctcaggtgaagcatagactctttcatggtagacagatttcacgactcagagatagaaatctcttgctatcatcaggtcacgggcagctcctgtggagtcctgcccaacttatgtggcttccataaaatggcaacagtccaggctccttgcctaattttagagcattaactccctaattgccagtaagcaaggaggtggatctctgcaaacctacactgtctatgacagctctagttgtacttggtgtgactaaatacctcaaaggcaacctgcttctgcaggttttgaagtgtcagcttcataagacactgaggtttagaattgtttgattctagatcataactgaagggcataaatggaaacaggatatgaagggaaacaagtagcatcatggagctgaaaagtggtgcatcacccaatgggctagcacaaacaaggatcacactgtccattctcttgtctgctaaattaagcattttcttgcctcctttggcttcatcttttcacaacagctggatagagggatcagaaatgactgtgtcatggtgctcattcactgcaaactcccagttgcaagctccttggctcccccggagggagcaagaatctcatagttcagagacacagagggccttttagccctaatgaccttttggatgggactgcaactcatgactatcctgatattaaaagaaaggactttgttaatcttctcccccatagctctgctgcgtaggtctacatcttactcagaatcactacacattcctttagtcttcctccaagctccagagccattggtacaaatgctttattgaaactaaatacataatacacacaatgagatgaagacaatatagaagtccgcatagtcatcataatcccgttccttggccggttgaggcagctcagtggctgagcccagtcaagccaacccgcagcttcactcacgacttcaagatttgatgctaattcttttggatttctacagttattaaataagtgtctgagtggaaaaaaaaaaaaaaaaaaaaaaaaaaa

SEQ ID NO: 9 - DNA, 972 bp, Homo sapiens
  CDS (168)..(839)
ttttgaattgtataccgagacccaagctggctagcgtttaaacttaagcttggtaccgagctcggatccactagtccagtgtggtggaattccgggtggtggactggattagctgcggagccctggaagctgcctgtccttctccctgtgcttaaccagaggtgcccatgggttggacaatgaggctggtcacagcagcactgttactgggtctcatgatggtggtcactggagacgaggatgagaacagcccgtgtgcccatgaggccctcttggacgaggacaccctcttttgccagggccttgaagttttctacccagagttggggaacattggctgcaaggttgttcctgattgtaacaactacagacagaagatcacctcctggatggagccgatagtcaagttcccgggggccgtggacggcgcaacctatatcctggtgatggtggatccagatgcccctagcagagcagaacccagacagagattctggagacattggctggtaacagatatcaagggcgccgacctgaaggaagggaagattcagggccaggagttatcagcctaccaggctccctccccaccggcacacagtggcttccatcgctaccagttctttgtctatcttcaggaaggaaaagtcatctctctccttcccaaggaaaacaaaactcgaggctcttggaaaatggacagatttctgaaccgcttccacctgggcgaacctgaagcaagcacccagttcatgacccagaactaccaggactcaccaaccctccaggctcccagaggaagggccagcgagcccaagcacaaaaccaggcagagatagctgcctgctagatagccggctttgccatccgggcatgtggccacactgctcaccaccgacgatgtgggtatggaaccccctctggatacagaaccccttcttttccaaattaaaaaaaaaaatcatccaggaa

SEQ ID NO: 10 - DNA, 886 bp, Homo sapiens
  CDS (114)..(365)
acgtgcgggaattccccggtcgacccacgcgtccgctcccttcccgctgtgtggctccagcaagtttcctcccacctcaggtctgggtttccaggcattaagtgacaaagtggatgcgacgctccttctggactgtaatgcgcactgcgtggagatgttcgtgttccagtgtagacagggcgttgtcacatcaggcaggactacagggacaatgtttgtcagcctgtcttctgggcaacttggggtatcctccctttatatcacctcctgcccaggtgctctgcgccgccagagcatcatgtcatttgggatccctgatggcaattttgagactttggttcacagtaaagattggtcctgtgtgatcttaaagtaatgtggcttaaaaacaaatggctgtcagggaattgtaaatcaaagcaaacaccgatgagaatggcccaaatccaggacactcagcaccaaatgcgagggaggatgtgaagccacaggaagcctcactcactgctggggggaacgcaaaacagtacagccaccttggaagacagtttgacaaatccttagaaagctaaacacacttttaccctgtgatccaacaatcatgctccttgatatttacccagaggagttaaaaaaacttatgtccacactaaaaacctgcacatggggggaaataagagactttatttcggataatttataaacaactggatccttaaaggtaaacaaaagttttcctcttcgcaaccaacaaccaaaaacttacctggcggtgccccccaaacaatgggaaaatttttaccccgccccttaaaaaacatacgcccgcgatgagtcctatagaaaaattttcttcccggaaactctctttcgcgatttgtgagcc

SEQ ID NO: 11 - DNA, 2779 bp, Homo sapiens
  CDS (1408)..(2367)
atgacagatgtttttattgactacgacgttgagttacaagaactccagattccaggaaaagcatgtgtgaataacaccattgtatggactaacagttccctcaaccagaacatgacaaatggaacacgttgtggctttgtggctgtggctggtgatccacttgatcttaacccttccatctgtaatgggaatttcatgaacaggctgcattactttgagtgcaggtgctgttatccacagctgcaagaactgaagacagatcacatcacaggactctttgcagactcttgccagtaccagcccagagcctggttgctgaacatcgagagcgaaatgatcaaatttgccagttactatgctggaattgctgtcgcagtacttatcacaggatatattcaaatatgcttttgggtcattgccgcagctcgtcagatacagaaaatgagaaaattttactttaggagaataatgagaatggaaatagggtggtttgactgcaattcagtgggggagctgaatacaagattctctgatgatattaataaaatcaatgatgccatagctgaccaaatggcccttttcattcagcgcatgacctcgaccatctgtggtttcctgttgggatttttcaggggttggaaactgaccttggttattatttctgtcagccctctcattgggattggagcagccaccattggtctgagtgtgtccaagtttacggactatgagctgaaggcctatgccaaagcaggggtggtggctgatgaagtcatttcatcaatgagaacagtggctgcttttggtggtgagaaaagagaggttgaaaggtatgagaaaaatcttgtgttcgcccagcgttggggaattagaaaaggaatagtgatgggattctttactggattcgtgtggtgtctcatctttttgtgttatgcactggccttctggtacggctccacacttgtcctggatgaaggagaatatacaccaggaacccttgtccagattttcctcagtgtcatagtaggagctttaaatcttggcaatgcctctccttgtttggaagcctttgcaactggacgtgcagcagccaccagcatttttgagacaatagacaggaaacccatcattgactgcatgtcagaagatggttacaagttggatcgaatcaagggtgaaattgaattccataatgtgaccttccattatccttccagaccagaggtgaagcccctcttccttccggccagggtggcacaactcttccttccccgtgcacagcaggaaagctgccatcagctgagcaagtccaccaacagtttctgtgtcccacttcatctttaataaggacaccatcttcttgtattatacaagaaaggagtgtacctatcacacacagggggaaaaatgctcttttgggtgctaggcctcctaatcctctgtggttttctgtggactcgtaaaggaaaactaaagattgaagacatcactgataagtacatttttatcactggatgtgactcgggctttggaaacttggcagccagaacttttgataaaaagggatttcatgtaatcgctgcctgtctgactgaatcaggatcaacagctttaaaggcagaaacctcagagagacttcgtactgtgcttctggatgtgaccgacccagagaatgtcaagaggactgcccagtgggtgaagaaccaagttggggagaaaggtctctggggtctgatcaataatgctggtgttcccggcgtgctggctcccactgactggctgacactagaggactacagagaacctattgaagtgaacctgtttggactcatcagtgtgacactaaatatgcttcctttggtcaagaaagctcaagggagagttattaatgtctccagtgttggaggtcgccttgcaatcgttggagggggctatactccatccaaatatgcagtggaaggtttcaatgacagcttaagacgggacatgaaagcttttggtgtgcacgtctcatgcattgaaccaggattgttcaaaacaaacttggcagatccagtaaaggtaattgaaaaaaaactcgccatttgggagcagctgtctccagacatcaaacaacaatatggagaaggttacattgaaaaaagtctagacaaactgaaaggcaataaatcctatgtgaacatggacctctctccggtggtagagtgcatggaccacgctctaacaagtctcttccctaagactcattatgccgctggaaaagatgccaaaattttctggatacctctgtctcacatgccagcagctttgcaagactttttattgttgaaacagaaagcagagctggctaatcccaaggcagtgtgactcagctaaccacaaatgtctcctccaggctatgaaattggccgatttcaagaacacatctccttttcaaccccattccttatctgctccaacctggactcatttagatcgtgcttatttggattgcaaaagggagtcccaccatcgctggtggtatcccagggtccctgctcaagttttctttgaaaaggagggctggaatggtacatcacataggcaagtcctgccctgtatttaggctttgcctgcttggtgtgatgtaagggaaattgaaagacttgcccattcaaaatgatctttaccgtggcctgccccatgcttatggtccccagcatttacagtaacttgtgaatgttaagtatcatctcttatctaaatattaaaagataagtcaaacattaaaaaaaaaaaa

SEQ ID NO: 12 - DNA, 912 bp, Homo sapiens
  CDS (54)..(776)
ccatgataccatagtccagtgtggtggaattcgcctgagaacacttagccttcatgagtgtccccaccatggcctggatgatgcttctcctcggactccttgcttatggatcaggagtggattctgagaccgtggtgacccaggagccatcgttctcagtgtcccctggagggacagtgactctcacttgtggcttgaattctggctcagtctctgatagtttttatcccagctggcaccagcagaccccaggccagcctccacgcactctcatttataacacacatattcgcgcttctggggtctctgatcgcttctctggctccatcgttgggaacaaagccgccctcaccatcacgggggcccaggctgacgatgagtgtgtttattactgtgtactctacatgggcaatgacatttcgctgttcggcggagggacaagactgaccgtcctaggtcagcccaaggctgccccctcggtcactctgttcccgccctcctctgaggagcttcaagccaacaaggccacactggtgtgtctcataagtgacttctacccgggagccgtgacagtggcctggaaggcagatagcagccccgtcaaggcgggagtggagaccaccacaccctccaaacaaagcaacaacaagtacgcggccagcagctacctgagcctgacgcctgagcagtggaagtcccacaaaagctacagctgccaggtcacgcatgaagggagcaccgtggagaagacagtggcccctacagaatgttcataggttcccaactctaaccccacccacgggagcctggagctgcaggatcccaggggagggggtctctcctcccaccccaaggcatcaagcccttctccctgcactcaataaaccctcaacaaatattctcattgtcaat

SEQ ID NO: 13 - DNA, 6116 bp, Homo sapiens
  CDS (464)..(4048)
gctccgcaattcccgggtcgacccacgcgtccgaaaaaaagcataacatatccccattgtaacatttggaaactaggaaaatggaaaggagcaaaagcaaaaattctttgaatagtacctcaacccaaagccttctttcttggcacggtagtgtatttctttccatttcgttctccacagtcattatatatgtataagattaatttcattttattttatttattttcagacctgttcaacaggaagtaagattaattttaaaccctgcttttttgaccaagcttctcacctaagcaccactgaatggcagcatggaattccctccacgccatccatgcagctggtcccttagctccagtctctgacttgccatgtctctttgtcctccccgacaggacatgaaaccaaggctctgctgaacaacagtgggccccgctacaagcgcagcaagctggagaggcagatgaactgcgacgtgctctggtgtgtcctgctccttgtttgcatgtctctgttttcagcagtcggacatggactgtggatatggcggtatcaagagaagaagtcattattttatgtccccaagtctgatggaagctccttatccccagtcacagctgcagtttactcatttttaacaatgataatagttctgcaggttttgatcccaatttccttatacgtttccattgaaattgttaaagcatgccaagtgtacttcattaaccaggacatgcagttgtatgacgaagaaacagactcgcagctgcagtgccgagctctgaacatcacggaagacttaggacagatacagtacattttctcagataaaactggcactttgacagagaataagatggttttccgaagatgcactgtgtctggtgtagaatattctcatgatgcaaatgcgcagcgtctggccaggtaccaagaggcagactcggaggaggaggaggtggtgcccagagggggctcggtgtcccagcgcggcagcatcggcagccaccagagtgtccgggtggtgcacagaacccagagcaccaagtcccaccggcgcacgggcagccgggccgaggccaagagggccagcatgctgtccaagcacacggccttcagcagccccatggagaaggatatcacgcccgacccaaagctgctggagaaggtgagtgagtgtgacaagagcctagccgtggcgaggcatcaggagcacctgctggcccacctctcgcccgagctgtctgacgtctttgatttcttcatcgcactcaccatctgcaacacagtcgtcgtcacgtccccggatcagccacgaacaaaggtgagggtgaggtttgagctgaagtccccggtgaagacgatagaagacttcctgcggaggttcacacccagctgcctgacctcaggctgcagcagcatcgggagcctggccgccaacaagtccagccacaagttgggctccagcttcccgtccaccccgtccagcgacggcatgcttctcaggctggaggagaggctgggccagcccacctcggccatcgccagcaacggctacagcagccaggcggacaactgggcctcggagcttgctcaggagcaggagtcagagcgcgagctgcggtacgaggcggagagcccggatgaggccgcactggtgtatgcggccagagcctacaactgcgtgcttgtggagcggctgcacgaccaagtgtcagtggagctgccccacctgggcaggctcaccttcgagctcctgcacacactgggtttcgattccgtccgcaagaggatgtcagtggtgatccggcacccgcttaccgatgagatcaacgtctacaccaagggggccgactcagtggtcatggatctcctgcagccctgctcttcagttgacgccagagggaggcatcaaaaaaagattcggagcaaaactcagaattacctcaacgtgtatgcggcggaaggcctgcgcaccttgtgcatcgccaagagagttctgagtaaagaagagtatgcctgctggttgcaaagccacctagaagccgaatcctccctggaaaacagcgaggagctcctcttccagtctgccattcgcctggagaccaacctgcacttgttaggtgccactgggattgaagaccgcctgcaggacggagtccctgaaactatttctaaattgcgtcaagcgggcctgcagatttgggttctcactggtgacaaacaagaaacagctgtcaacattgcatatgcctgcaaactgctggaccacgacgaggaggtcatcaccctgaatgccacctcccaggaggcgtgtgcagccctgctagaccagtgcctatgctacgtgcagtccagaggcccccagagagcccctgagaagaccaagggcaaagtgagcatgaggttctcctctctctgcccaccctccacgtccactgcctctggccgcagacccagcctcgtgatcgatgggagaagcctggcctacgctctcgagaaaaacctggaggacaaattcctcttccttgccaagcagtgccgctccgtcctctgctgtcggtcgacgcctctgcagaagagcatggtggtgaagctggtgcggagcaagctcaaggccatgaccctggccataggtgatggagccaatgatgtcagcatgatccaggtggcagatgtgggtgtgggaatctccggccaggagggtatgcaggcagtgatggccagcgactttgcagtgccgaaattccgatacctggagaggctcttgattcttcacgggcattggtgctactcccgacttgccaacatggtgctgtacttcttctacaaaaacacaatgttcgtgggcctcctgttttggttccagtttttctgtggcttctctgcatctaccatgattgaccagtggtatctaatcttctttaatctgctcttctcgtcacttcccccgctcgtgactggggtgctggacagggatgtgccagccaatgtgctgctgaccaacccgcagctctacaagagtggccagaacatggaggaataccggccacgaacgttctggtttaacatggccgacgccgccttccagagcctggtttgcttttccattccttacctggcctactatgactcgaacgtggacctgtttacctgggggacccctattgtgacaatcgcgctgctcactttcctgctccacctgggcattgaaaccaaaacctggacctggctcaactggataacgtgtggcttcagtgtccttttgtttttcaccgtggctttgatttacaatgcgtcttgtgccacgtgctatcctccgtccaacccttactggactatgcaagccttactgggtgacccagtgttttacttgacttgcctgatgacgcctgtcgctgcactgctgcccagattgtttttcagatccctccaggggagggttttccccacacaacttcagctggcacgtcagttgaccaggaagtcccccaggagatgcagtgctcccaaagagacctttgctcagggacgcctcccgaaggactcgggaaccgagcactcatcagggaggacagtcaagacctctgtgcccctgtcccagccttcttggcacacacagcagccggtctgctccctggaggccagcggggagcccagcacagtggacatgagcatgccagtgagggagcacaccctgctggaggggctgagcgcaccggcccccatgtcctctgcgccaggggaggctgtcctgaggagtccaggagggtgtcctgaggagtccaaggtgagagctgccagcaccggcagggtgacccccctgtcttccctcttcagcctgcctaccttcagcttactcaactggatttcctcctggtcgctggtcagcaggctggggagtgtcttacagttctcccggacggagcagcttgcagatggacaagcgggacgtggacttcctgtccagccccactcaggccgatcaggacttcaagggccagaccacagactacttataggagcatcttcaaggcggtcacagtgaaaaccttgaaatggccttttttaatatatataaataaatgttaatattatttatgtttattatttgcacagaagagttctagggagatgtatttctaaatgtttcccaggctaatacaggaaacaagaggtaccaaaaaagaaagtttattttttaaaattctaagtagagtatattgaaaagaaaaagaagagccttaacatatataaaagtttaaagaagagtaacacttgaaaagtgtgtttagatttattttttcatctcatttttaagaacaagcagtacgatttgttttcttcaacatgtgtgactgcgcactgagtacaaatgtgtgactgctcatggttaatgcaggcaggtgtgaacatgggggaacaatgagcagagatggcagagggcagagcacatggcccccagaggcttccagtctcactgacacaggagggctgggctccacttcatccagatgaaggaaaggaagacctcaagaaaaattcacagttgagtgcatcccagcattctgttccgggcaggcatttcaggaagaccgccttgtaggtattacatccctggtgtcgtattttgcctgttaaatcgtaacaagcaataaacaactttcactttgcaaagacagtgtgtccagttaccactggtgtatgaaatgattaatacctgacctcacagagtatgatctgagggcacttccgtaaggcaagtccttttagaggctatgaagaaaacagctgcatggcacataccaaagctgctgcacagccggccaccatggcaccctgcaccaggccatcagcaccacgtgccaaggagctcagcggtcttcaggcatttttgtaatgagccattagttctgtccctctaaaactagaaaaggaagggcaggaaatgataacaacccaaggcaatgatatggcatgtcatcttctgagcccttctttctactttgtcaaacagttcttagttgctggctctgctcggcaccggggctgtgaagggtgtactccctgctgtgtgggagggacctagggcctctttggatgctgtcttcgaggacagcaatgcagagagggcataggatctgaggacaaggaaattcctcagcatggcgtatcaggaaagcatggctcattctgcaatgagccatgagtgtgggccatcgcaagtcacagaaattgcacctcattccagtcaagcagaaaaacaggcacaggctcagtgtaggtcccaagagagggtgcctggactcagcaactcggacctgggcttttctcccagctttcagggacagctttgtcctgagtctgcctctgttcacggggatgcttggctggagtcacccccaggacttatccatgcatcactattcagaagacacagagggcccctctctccacattccaaacagagtcctggtttcctcagcctcaccctgcatagcttgcacaacatcctcagaaccattcactggcaaatggaggggaacgtgctgactgggactcccagctggagctgggaggagaggtccacttcccttagaacacctgagctgctgcatgagtggacgtcagaagaatctctatgccctgttaaatggggagacaaaggggtggtgggggcttcagccagtgatttcggaccgaaggtgacagccgtcccaaccctgcccagcctgatgccacctcctctgttcttggaacaacgcataggaaaagaatctcctttggaaggtgacactgctccctgaattaaggtaatggttgcgagcaccaagtacaaggactagacgcatatttacctgcgtatctgagagttccagattcccagcttccagatgatccttgcacagacaacctaccttctttccagaggatgtctttctcctctggagagtagatgcttgctcttgggaaacggaatgaccttggcgctggcttcaggaatatgcatcccacagccagtttagagaaatacatgttgtaaatggcattgacagctgctctttaggatggggagtattatggaaatccacaataacaatctatggcaagcaact

SEQ ID NO: 14 - DNA, 7741 bp, Homo sapiens
  CDS (339)..(6062)
ggtaccggtccggaattcccgggtcgacgatttcgtggacggggaatagagagcaaagcctggaggcgccggagcaccctgagcacaggggagacagagcggaaggaggagaggattgatgactgattggacagtggtgcaggagggaaggtctctgcatgtcagtgattaaattgctgaagatgccactgcctgagacgggcagtattgaaggaaggagtggaggccctggtgcccggcccttggtgctgagtatccagcaagagtgaccggggtgaagaagcaaagactcggttgattgtcctgggctgtggctggctgtggagctagagccctggatggcccctgagccagccccagggaggacgatggtgccccttgtgcctgcactggtgatgcttggtttggtggcaggcgcccatggtgacagcaaacctgtcttcattaaagtccctgaggaccagactgggctgtcaggaggggtagcctccttcgtgtgccaagctacaggagaacccaagccgcgcatcacatggatgaagaaggggaagaaagtcagctcccagcgcttcgaggtcattgagtttgatgatggggcagggtcagtgcttcggatccagccattgcgggtgcagcgagatgaagccatctatgagtgtacagctactaacagcctgggtgagatcaacactagtgccaagctctcagtgctcgaagaggaacagctgccccctgggttcccttccatcgacatggggcctcagctgaaggtggtggagaaggcacgcacagccaccatgctatgtgccgcaggcggaaatccagaccctgagatttcttggttcaaggacttccttcctgtagaccctgccacgagcaacggccgcatcaagcagctgcgttcaggtgccttgcagatagagagcagtgaggaatccgaccaaggcaagtacgagtgtgtggcgaccaactcggcaggcacacgttactcagcccctgcgaacctgtatgtgcgagtgcgccgcgtggctcctcgtttctccatccctcccagcagccaggaggtgatgccaggcggcagcgtgaacctgacatgcgtggcagtgggtgcacccatgccctacgtgaagtggatgatgggggccgaggagctcaccaaggaggatgagatgccagttggccgcaacgtcctggagctcagcaatgtcgtacgctctgccaactacacctgtgtggccatctcctcgctgggcatgatcgaggccacagcccaggtcacagtgaaagctcttccaaagcctccgattgatcttgtggtgacagagacaactgccaccagtgtcaccctcacctgggactctgggaactcggagcctgtaacctactatggcatccagtaccgcgcagcgggcacggagggcccctttcaggaggtggatggtgtggccaccacccgctacagcattggcggcctcagccctttctcggaatatgccttccgcgtgctggcggtgaacagcatcgggcgagggccgcccagcgaggcagtgcgggcacgcacgggagaacaggcgccctccagcccaccgcgccgcgtgcaggcacgcatgctgagcgccagcaccatgctggtgcagtgggagcctcccgaggagcccaacggcctggtgcggggataccgcgtctactatactccggactcccgccgccccccgaacgcctggcacaagcacaacaccgacgcggggctcctcacgaccgtgggcagcctgctgcctggcatcacctacagcctgcgcgtgcttgccttcaccgccgtgggcgatggccctcccagccccaccatccaggtcaagacgcagcagggagtgcctgcccagcccgcggacttccaggccgaggtggagtcggacaccaggatccagctctcgtggctgctgccccctcaggagcggatcatcatgtatgaactggtgtactgggcggcagaggacgaagaccaacagcacaaggtcaccttcgacccaacctcctcctacacactagaggacctgaagcctgacacactctaccgcttccagctggctgcacgctcggatatgggggtgggcgtcttcacccccaccattgaggcccgcacagcccagtccaccccctccgcccctccccagaaggtgatgtgtgtgagcatgggctccaccacggtccgggtaagttgggtcccgccgcctgccgacagccgcaacggcgttatcacccagtactccgtggcctacgaggcggtggacggcgaggaccgcgggcggcatgtggtggatggcatcagccgtgagcactccagctgggacctggtgggcctggagaagtggacggagtaccgggtgtgggtgcgggcacacacagacgtgggccccggccccgagagcagcccggtgctggtgcgcaccgatgaggacgtgcccagcgggcctccgcggaaggtggaggtggagccactgaactccactgctgtgcatgtctactggaagctgcctgtccccagcaagcagcatggccagatccgcggctaccaggtcacctacgtgcggctggagaatggcgagccccgtggactccccatcatccaagacgtcatgctagccgaggcccagtggcggccagaggagtccgaggactatgaaaccactatcagcggcctgaccccggagaccacctactccgttactgttgctgcctataccaccaagggggatggtgcccgcagcaagcccaaaattgtcactacaacaggtgcagtcccaggccggcccaccatgatgatcagcaccacggccatgaacactgcgctgctccagtggcacccacccaaggaactgcctggcgagctgctgggctaccggctgcagtactgccgggccgacgaggcgcggcccaacaccatagatttcggcaaggatgaccagcacttcacagtcaccggcctgcacaaggggaccacctacatcttccggcttgctgccaagaaccgggctggcttgggtgaggagttcgagaaggagatcaggacccccgaggacctgcccagcggcttcccccaaaacctgcatgtgacaggactgaccacgtctaccacagaactggcctgggacccgccagtgctggcggagaggaacgggcgcatcatcagctacaccgtggtgttccgagacatcaacagccaacaggagctgcagaacatcacgacagacacccgctttacccttactggcctcaagccagacaccacttacgacatcaaggtccgcgcatggaccagcaaaggctctggcccactcagccccagcatccagtcccggaccatgccggtggagcaagtgtttgccaagaacttccgggtggcggctgcaatgaagacgtctgtgctgctcagctgggaggttcccgactcctataagtcagctgtgccctttaagattctgtacaatgggcagagtgtggaggtggacgggcactcgatgcggaagctgatcgcagacctgcagcccaacacagagtactcgtttgtgctgatgaaccgtggcagcagcgcagggggcctgcagcacctggtgtccatccgcacagcccccgacctcctgcctcacaagccgctgcctgcctctgcctacatagaggacggccgcttcgatctctccatgccccatgtgcaagacccctcgcttgtcaggtggttctacattgttgtggtacccattgaccgtgtgggcgggagcatgctgacgccaaggtggagcacacccgaggaactggagctggacgagcttctagaagccatcgagcaaggcggagaggagcagcggcggcggcggcggcaggcagaacgtctgaagccatatgtggctgctcaactggatgtgctcccggagacctttaccttgggggacaagaagaactaccggggcttctacaaccggcccctgtctccggacttgagctaccagtgctttgtgcttgcctccttgaaggaacccatggaccagaagcgctatgcctccagcccctactcggatgagatcgtggtccaggtgacaccagcccagcagcaggaggagccggagatgctgtgggtgacgggtcccgtgctggcagtcatcctcatcatcctcattgtcatcgccatcctcttgttcaaaaggaaaaggacccactctccgtcctctaaggatgagcagtcgatcggactgaaggactccttgctggcccactcctctgaccctgtggagatgcggaggctcaactaccagaccccaggtatgcgagaccacccacccatccccatcaccgacctggcggacaacatcgagcgcctcaaagccaacgatggcctcaagttctcccaggagtatgagtccatcgaccctggacagcagttcacgtgggagaattcaaacctggaggtgaacaagcccaagaaccgctatgcgaatgtcatcgcctacgaccactctcgagtcatccttacctctatcgatggcgtccccgggagtgactacatcaatgccaactacatcgatggctaccgcaagcagaatgcctacatcgccacgcagggccccctgcccgagaccatgggcgatttctggagaatggtgtgggaacagcgcacggccactgtggtcatgatgacacggctggaggagaagtcccgggtaaaatgtgatcagtactggccagcccgtggcaccgagacctgtggccttattcaggtgaccctgttggacacagtggagctggccacatacactgtgcgcaccttcgcactccacaagagtggctccagtgagaagcgtgagctgcgtcagtttcagttcatggcctggccagaccatggagttcctgagtacccaactcccatcctggccttcctacgacgggtcaaggcctgcaaccccctagacgcagggcccatggtggtgcactgcagcgcgggcgtgggccgcaccggctgcttcatcgtgattgatgccatgttggagcggatgaagcacgagaagacggtggacatctatggccacgtgacctgcatgcgatcacagaggaactacatggtgcagacggaggaccagtacgtgttcatccatgaggcgctgctggaggctgccacgtgcggccacacagaggtgcctgcccgcaacctgtatgcccacatccagaagctgggccaagtgcctccaggggagagtgtgaccgccatggagctcgagttcaagttgctggccagctccaaggcccacacgtcccgcttcatcagcgccaacctgccctgcaacaagttcaagaaccggctggtgaacatcatgccctacgaattgacccgtgtgtgtctgcagcccatccgtggtgtggagggctctgactacatcaatgccagcttcctggatggttatagacagcagaaggcctacatagctacacaggggcctctggcagagagcaccgaggacttctggcgcatgctatgggagcacaattccaccatcatcgtcatgctgaccaagcttcgggagatgggcagggagaaatgccaccagtactggccagcagagcgctctgctcgctaccagtactttgttgttgacccgatggctgagtacaacatgccccagtatatcctgcgtgagttcaaggtcacggatgcccgggatgggcagtcaaggacaatccggcagttccagttcacagactggccagagcagggcgtgcccaagacaggcgagggattcattgacttcatcgggcaggtgcataagaccaaggagcagtttggacaggatgggcctatcacggtgcactgcagtgctggcgtgggccgcaccggggtgttcatcactctgagcatcgtcctggagcgcatgcgctatgagggcgtggtcgacatgtttcagaccgtgaagaccctgcgtacacagcgtcctgccatggtgcagacagaggaccagtatcagctgtgctaccgtgcggccctggagtacctcggcagctttgaccactatgcaacgtaactaccgctcccctctcctccgccacccccgccgtggggctccggaggggacccagctcctctgagccataccgaccatcgtccagccctcctacgcagatgctgtcactggcagagcacagcccacggggatcacagcgtttcaggaacgttgccacaccaatcagagagcctagaacatccctgggcaagtggatggcccagcaggcaggcactgtggcccttctgtccaccagacccacctggagcccgcttcaagctctctgttgcgctcccgcatttctcatgcttcttctcatggggtggggttggggcaaagcctcctttttaatacattaagtggggtagactgagggattttagcctcttccctctgatttttcctttcgcgaatccgtatctgcagaatgggccactgtaggggttggggtttattttgttttgtttttttttttcttgagttcactttggatccttattttgtatgacttctgctgaaggacagaacattgccttcctcgtgcaaagctggggctgccagcctgagcggaggctcggccgtgggccgggaggcagtgctgatccggctgctcctccagcccttcagacgagatcctgtttcagctaaatgcagggaaactcaatgtttttttaagttttgttttccctttaaagcctttttttaggccacattgacagtggtgggcggggagaagatagggaacactcatccctggtcgtctatcccagtgtgtgtttaacattcacagcccagaaccacagatgtgtctgggagagcctggcaaggcattcctcatcaccatcgtgtttgcaaaggttaaaacaaaaacaaaaaaccacaaaaataaaaaacaaaaaaaacaaaaaacccaagaaaaaaaaaaagagtcagcccttggcttctgcttcaaaccctcaagaggggaagcaactccgtgtgcctggggttcccgagggagctgctggctgacctgggcccacagagcctggctttggtccccagcattgcagtatggtgtggtgtttgtaggctgtggggtctggctgtgtggccaaggtgaatagcacaggttagggtgtgtgccacaccccatgcacctcagggccaagcgggggcgtggctggcctttcaggtccaggccagtgggcctggtagcacatgtctgtcctcagagcaggggccagatgattttcctccctggtttgcagctgttttcaaagcccccgataatcgctcttttccactccaagatgccctcataaaccaatgtggcaagactactggacttctatcaatggtactctaatcagtccttattatcccagcttgctgaggggcagggagagcgcctcttcctctgggcagcgctatctagataggtaagtgggggcggggaagggtgcatagctgttttagctgagggacgtggtgccgacgtccccaaacctagctaggctaagtcaagatcaacattccagggttggtaatgttggatgatgaaacattcatttttaccttgtggatgctagtgctgtagagttcactgttgtacacagtctgttttctatttgttaagaaaaactacagcatcattgcataattcttgatggtaataaatttgaataatcagatttcttacaaaccaggaaaaaaaaaaa

SEQ ID NO: 15 - DNA, 1309 bp, Homo sapiens
  CDS (484)..(765)
cgacccacgcgtccgatgtcattactatatttcaatgcatcatgcttgtaacaggcatttcatttataataagaatgagttattcatttgtaagccgttcagtaatttatctactattcctaaattggcataatgttagataatctattttgaatcacctttaattacatgtcagaatgccttaactaccctaacttgacaaaacagaattctttggtagacgcggtgggggcggggtggggggtctggacggagtctctatttaaggagaaatcatcatgctatgataaaacacagaagcatgagtggcaagtggcggggtatttattttgcacaaactatttgcagtctctgtgtatttaaaaagtaaagaaagttgcatccagaagggttttgttagaatgaatacatttatattaggactgacaacttcagctcttttgtttaggttttcaattatttttggtaagagtatgtagccttatgatctggatatattttgcattcattttccaacgcctacatttaattcctggtaagagcagtgctcgtcaagtttctggtttttctctgctctcatttaacccgtcaaacacaatctttgtaaagctagattggtggtgttttatacaacttatttactcagcttacctttttgagaaacgattgttagaaattgacgatgtgtttgttccagtgatactgaaagtagtgggggcaagaattgagtttcacagtggaattggctttggatctggcctatagattagtgacataaaatattttctctattttcccctgttctttttgtgttatgcacttaattttatgactgccgggggggtcagctggagtgctgcttaacaagtatctctcctactctcagtggtcagaggctgtgttggacccatagtagaattttccaggtcacagacccaagcttccatgggttgttactgtgctgtaccacttggtgggtctgattctgaacctgatgtgtgtgttaattatattttaagcaacacacacacacacacacgcctcatgtaatggacttttataacaaaagaaaaaatttggatttctaatttacaaatggcaaattatttatccctctctggatgcaccaaagaccagtaaagtttatagcttttccatctatatttataaagcaatactgtattataaaaatcaatatttttatcacatgcttgaaatttttattttgttgttttaaaatgtgcactctaaacatatcagaaccttatttcttcctatgaacttaagctgcctgcgcacaaaaaaaaaa

SEQ ID NO: 16 - DNA, 1600 bp, Homo sapiens
  CDS (242)..(589)
tttcgtctggcggccgggtaagggtctgagtggatctcctgccaggccagagcgccttcgggggccgcggcggaaggccaggagtttgcagccagggcgccgggtttgtggtctgcagtgtcgtgaggctgaggtgcagcatgtctagactgggagccctgggtggtgcccgtgccgggctgggactgttgctgggtaccgccgccggccttggattcctgtgcctcctttacagccagcgatggaaacggacccagcgtcatggccgcagccagagcctgcccaactccctggactatacgcagacttcagatcccggacgccacgtgatgctcctgcgggctgtcccaggtggggctggagatgcctcagtgctgcccagccttccacgggaaggacaggagaaggtgctggaccgcctggactttgtgctgaccagccttgtggcgctgcggcgggaggtggaggagctgagaagcagcctgcgagggcttgcgggggagattgttggggaggtccgatgccacatggaagagaaccagagagtggctcggcggcgaaggtttccgtttgtccgggagaggagtgactccactggctccagctctgtctacttcacggcctcctcgggagccacgttcacagatgctgagagtgaaggggggtgagttgtctctcttggaggcagttatggctacagccaggttgtgttttgtaaaagtattatcaatggaaaattcaaaccaagctgctgcaaatgatttttggaacaggtaagagtataataaatacagaagagttgaaacaaaaaacccatccaatttatgtcattcagacaaatgtagatgttaatagcagttattgcttgcatctgttatcttagtttattacatagttatgatatattatttgggcatttttctgtcttatcacaaggacttgataagcattgtttgactttgttcctttccttgggtggctgagctggtatacggagatgtctaagcacgaagcatgctcctccctgggagtcaccctcttcccacaggggagccttgcctgtgatcctttgcatttttacaggtgggaggtggatgtcctgagttctcagtggcccaggagggctgacgataggcctttctgtgaggcggggcagctggcacgagtctggtggacaccctcctccaagcctggccatgttaacggtgcccttacccccaaacccccttaccaccccttttcaccccctccccccaccgcctcccaccctaactctacaccttcaccctccgcccccagagtccacactcaacctccctccccatccccccaatccctttaccgctcaccctctcccccggcccccccactcaggcccagcttcccccccctgaccctccactctactgcttccctaccagccccctttcctgccctttctcaccctctcacccctctcccctccgtccgccactgctccccctctcctcccacaccatctatccgtcaaccttcaatccgcctctgacgtaacccaccgattcaccacctcacccttcagtcctctctcatcgcggaccccgtatcctccgataaatcc

SEQ ID NO: 17 - DNA, 735 bp, Homo sapiens
  CDS (402)..(482)
cttttttccccccccccgcaaatttttttccctttttaaaggttttggggggttaaaaaaaaaaagggttcccccccgggtttttggtggctcccccccctccccgttaaacccggggttattctaaaaaggttttaggcccgttagggccccttccaatttgttttaaaaaattcaattccggccccccttttttttttttttttcagaaaggattttggttttgtcccccggtgggagcccattaacccagatcctttccccgccccccccccctgggggcaaaaggggaccccttttccaaaaaaaaaaaaaaaaaaagaataataatgtgggtatgatgtgagatacgcatgcaaagtatgtaatataatgcctgccctccagtagctgctattgtaatgtacttcatatggatagggacagtgtttcttatttgctgctatctgttccaagtgtctagtgtggtacctaacacctaatgggcacttacatgtgtgttgaatagtgaaagggaaaaggaaccagaatctaggagaacagttaattattaccattctccctcattcctcttcatctcagttttaggtgaaataggcaaaagaatttcactacttaaacaatttgaagtgagggtgagaaataagagagaaaatgcaaggaagaaaaaactgtgtgacgtcttctatgtacaagccagttctcgtgccgaattcttggcctcgagggccaaat

SEQ ID NO: 18 - DNA, 1031 bp, Homo sapiens
  CDS (133)..(264)
cgtaccactgtggtgtaattccgggaaggacggacggagagtggatcctccaggtggtgggaaaagcttaacagcctggtgccagttaccctgcgatgggagagggggcagcccccatagaagcacgggcttatgggacccgggttccttcagtgctcacccacgaagaagggctcccaaacggccccactcgacggctcaccggaggatggtcctgcgcagtgggtgtttgttgaacagataagagacaacaaaacagactaagaagaggcctgttctatgaaccggggaaagtgaaggaatcacaaagagcggctcgccttagggcaatcctggggaaaagatggagaggcatggatttttcttggatgtgtgcctcatcctggggctcatccctctgagcatcaaatattcattgcaaaagagggggaaaaactctgctgcggacaatgctggatggtctgatctctcccttggccagaattaacggggcaattcctaacccctgttggtcctcagaatcacctggcctatgcacactcccgctaaaccactgaagtccaatttctgggagctcagccagggaatgtgtatttttaaacaagccccctaggttactctgataagtgcaaagtcagagagcgctgctctcatgcactgagcctgagcactcttctattaataaaaaaggagaggagaatcctgggttgggtgcccttcgccttctggcggcagaagagcagagccaggctctaagcacctgcacccaccgctgggctcaggagctgcgctggagaatagaagggctaatttagtcattcatgcctttttagagcaaattacatgtggagagggtggggcacactgaattttattttagccaaatgccccttatctccttatgcaattgatatttttatattgaacattagaggattggtcatttgtcatcaagtcgtctgtaatacagaaaacgataaatacaacctaacagttcaaacatgacgagttaaataaatgatggttaaaaa

SEQ ID NO: 19 - DNA, 780 bp, Homo sapiens
  CDS (271)..(435)
agcgtgtagatatacctatctattcgacgatgaagataccccaccaaacccaaaaaaagagatctctcgaggatccgaattcgcggccgcgtcgacctccaaaccacctttcactctcagaaaatgagaccacaaaggagtatgctataaatcaaatttgccaaccaattatgtagatattactcattctaggactaatgatgatggtaaagaagttgccagtgttatggcaatgaaaatttcagaaaggaggagttgatgatcttctagatgtatatgaacacctgtctatatctgcatgtatatgttttgacctgcagtggttgcaatgttgatatgtgttcaagattattcctgtctacaaaactgaaggcccatgttcaaattgttctttattgggtgtttttatggtcacgtggtaacaattttcttacctaacctacaaaaggttctcttgatgaacatttttatttatatttactaatctttttaaaaaaaagctttcatagcattatataatcagatgaagaaagcccagtagaataaaaaaaaaattcattagcctagcctatattatgttttctgtcaaaggaaaacaaattctcaaataggaattctaaaaatatttactaaagtaaaataactacttaaaatgttttattccagttggaaggaaggtacagggagaaatcgcaattatttaggggagaagtatatttattataagatggtgtcctcaaattagcctaccatggcacgtaggggcagcagctatattag

SEQ ID NO: 20 - DNA, 644 bp, Homo sapiens
  CDS (66)..(221)
ggaattcatattgcatgtccatattttccaaaaagagttaagatagcaagctactgtttaggattatggtaattctggatgtccttgaactgtatcacatgtggtttcttggcatattatatgatgcaattttttattgctttgtccatgcaataaacgctgataaatttttcggtttaaaatttaccaagtctgctactgtatcccagaattctcaatgaaagaaaatatttacagtttttaacattacaggtagaaaaaggatcaaagtgattttcttatttttctatctaattcatggaaaaaagaacacaggcagggagggtctttgctcctgttccccaattttctttgtccaaatggctcagccttgaattcaagaggagtggtgcaggatttaattgctcccacttgtcttccttgtgcaaaactgcagctagaagagcaaatgataagttgagaatatttaacactcagcaacaataccaggaacttgttcaaactttgtttttgaagcttcttgaccttccaatgatttatttcttccacacatgggttcattagaacttcacttggagaagaagagaaatagcatataacaacattcttcatctataaccagaatattccaagcctttccaaag

SEQ ID NO: 21 - DNA, 825 bp, Homo sapiens
  CDS (113)..(277)
attgaagccctcgttggaagcaccggaccggaattcccgggtcgacccacgcgtccgaaaatgttaaagaactatctttccaaaacgtaaacactgccttccctttacttaaatgtacgattttcttttgctcttgagttttattttcatagtggcatcttactggtctttcctttccaccatatttttggatgttgtgtgttccattttacattgcccagttaaaccacagacactcctgaagtcatgtttacatgtggactgcaagtcaacctagttggcatgttgatctaagctacaaattgcactgctgttttgccgaacccaacagtcggtttcttgccattatttgcggtattttaacttaaaactcacggtaatccttctcaccccatctagtttgttttaattgatctaacaaacactgcttgtttgaattcaaatggaggatccatggaagctctcccaccccaccctttgatacttgataaggggtcaaacagtacttcttttaaattcagataattctttgaatgaactatgaaatacttcagagggaaaggaaatatcgattctgagatggagagtaaaagaacaaggagatattcattactgttgcagataatttcttgcaatgaaaggaaaaaattagacgttggatatttttggttgtggtggttgtatagtgaggataggtggacaatagaaaaatcttccttggggattgaagttctaaatctagaacttaatcttgaagctggcacctttacttggacagcccactatgggagggaatctaaaaacctacctttgattagaaacctg

SEQ ID NO: 22 - DNA, 1702 bp, Homo sapiens
  CDS (709)..(966)
cgatcattgcgctcggagtgaggtaaaaaagttagtggatggaagggcatgaacacccggtacacggaaaaaaataatggtttaaataaatgaattatgtggggaatttcctgcaggagacaccctatctgggtgtccctaaacaggggtgtgggagctcaggcatgggggccgggctttaagcaccttcccagaccccaagaccctctgtcagcagcagctgtgccccaaagcccaggctcactgtgtaaatcccaaccccatgagccccaggccacaccagaccccctctgcaggccgctgtgagcattctccattgagaaacatctgccccactagacaccggcccctccccctgcagcctcctgcccccattagcacctgaattgcagcaaatgtgacccagaaacaccgcctggtggatgcagccagcgggtggagcgtggagagggatggggtggccatgtgaacccctcactcagccccattccaaggcctgaagtcccgtcaccttcctccagcctccctggcggcccccactttacagatggcacaactgagacttgggagtggagggcacagggctcctcccatggggaccctgggagccaccagaggccccagatgctcctgcccctctgggaacagtctttccccagacattgcactcctcaaagctgcattttcaattaactgtgccgctgagggatgtggcctgggtgccaggttttgagggctgggctgagtcctgcaggcagggcccgcttcccaccggacacctacctgcccagccccaggcagggagggaaccctgcgtgcagatgtgtgactgccatgaatgcggttttgcaagttttgccacatccagcccctgacacaaacagggctgatgagggctgtggagaccaggagggaagcagggagcttcctccgggtggggctgccttggggcacagggggcagtaagctggccaacagaagctgactcatgccccccaaccccaccatacagatgtggaaactaaggccagagggacagagcagcctcccacgtcctggggtgaacaccacacaggatcagtggcctccgcgacggctggtaggagggaagtaggcaaggagagagggatgtactcatctggatgggatggccactgccttcccagactgtcccaagcttgggacattctgatccccctgcagtccccaggaagcggagcctcagagtcctctggcttctagtccctcctgcaggccctgggatggctcctcatggagaaaccaggttcccagtccccggctgggcacagatggtaccgggatggctgaggccatgaccctacccctgtgaggggcacagctcaaagggctctggcctcatcccctgataccaaccaccatggggttaatcctggggtcggtgaattagggaaagccaggtagcctctgggcagcacaagccaggagcactactgtcctatgggttaggagaggcccgggggagtgggtgccagaccggggcagcatctcctcctacccagctagcccgaaagctggtgaaccgtgtgcaccctccccattgctccggtaaagggacagatgcccctgccagccccaggagagcacctagtcgcgcacacggagtccccaggcacacctctgaagggggaattccaccgcactggactaatgttcatcaagg

SEQ ID NO: 23 - DNA, 629 bp, Homo sapiens
  CDS (109)..(303)
  misc_feature (1)...(629): n = a,t,c or g
aacatttccagaaccagacagcatcctcacttgtacccactaaaggtaactactagtgtgacttctatctttgttggttggttgtatccattcttgtacatcataaagatgaaaccatattgtatgtatccttttctgtctggcctccttagctccttattattttggttagagtcattgatgttgttatgtgtgcagatggttctttttttaatgctatgtgtattggattacaggatatattgcatcaaaatttatgtatccattatattattaatgagcatttggattatttcaatttaagactattttgaatacaattactgtaattgtcttgttcatatcatgtgttcaacatatgcacttactcctaagagaggaatttgtaggtcataggatatgtgtatgatcagcttgggtatacactaccagttttctcctgtcaaccaggcatgagaaatctaattgccctatgtgctgactaaaacatgaaattgggaggcctctaattctaacccttctggagagggcccccccccccccctggggggggggccntccccccccaccccgnnggggnnaattttaaaataaagtcgtggttaagttatagatttttttaaaaaatt

SEQ ID NO: 24 - DNA, 757 bp, Homo sapiens
  CDS (165)..(359)
  misc_feature (1)...(757): n = a,t,c or g
tatagagaccactagtccaagtggaggaattcctcccctctagcccccttccttacctggtaagtcaaatgaaccaaatgtcaaacagtttggaaaggagagttgaagcagaaggaaacttccttctgcccctttgaatttgttactttttcttccaattaaaaatgtgttatttttacaataccattatattgacattgcaagggtccctgatgtttttattgttttctgttgtcactttgtatctcttctcccattcccatcccactcccattagcatcttctctgatgtgtttaatatgtatccttggatatatatgtattcttacatggtgttttctgtaaatttatataaatagtattacatgataattctcattctgatcctttcttcatttaaaactatgtttttcagttctgttggtgttgtgtttatatggtgcttttagccactgcattgtatttttattgctctgtctactgcgttttatttgcctgttcccctaagtgacagacaccttatttgttctccctgtaccacaaacaatgctctgtgggtatagtggctcacacttataggctcagatctttggggaggatgacgcagaaagatcgcttgagcccaggagtttcaaaccaaaccgggcaatgagacccaaacctcatctctgccacaaattaaaaacttaattgagcacattggcattgtgctccccccccanctncttcacagactggggaagaaaaaccattcacc

SEQ ID NO: 25 - DNA, 884 bp, Homo sapiens
  CDS (137)..(715)
ggacttcccgggtcggcctgggctgctcgtctggctgctcgtgctccggctgccttggcgggtgccgggccagctggaccccagcactggccggcggttctcggagcacaaactctgcgcggacgacgaatgcagcatgttaatgtaccgcggtgaggctcttgaagatttcacaggcccggattgtcgttttgtgaattttaaaaaaggtgatcctgtatatgtttactataaactggcaagaggatggcctgaagtttgggctggaagtgttggacgcacttttggatattttccaaaagatttaatccaggtagttcatgaatataccaaagaagagctacaagttccaacagatgagacggattttgtttgttttgatggaggaagagatgattttcataattataatgtagaagaacttttagggtttttggaactgtacaattctgcagctacagattctgagaaagctgtagaacaaactttacaggatatggaaaaaaaccctgaattatctaatgaaagggaacctgaacctgaaccagtagaagccaactcagaggaaagtgatagtgtattctcagaaaacactgaggatcttcaggaacagtttacaacttcaaagcaccactcccatggcaacaggcaagcaaattatgcttcaggagagcaggcttcatttgaatcttttgaagaaatgctgcaagaataaaataaaagtgcccgaaagtggaaaccaccaacccggcataagtcttaggtctccaaaggaccggaaaagaatgatggctattaacttttgaaaaaaaaaagactcttgaattggaaaaccaaattggcttacagccgaagcacttttattttgatgatggaccacccga

SEQ ID NO: 26 - DNA, 1070 bp, Homo sapiens
  CDS (111)..(305)
cgcaattcccgggtcgacccacgcgtccggggtggaaaaagtttgagagaaggagggaggaaaaggtgtcctggctagcaccatgtggattctcttgagatgagaagaaaatgcccggctacgtcccccttctgctgctcctgcttctcctgaggtgttcacaacggggtggaggagttaattttggtgagaaggatgcaaaagtccccgggacctggagagatggagtcagggtccctggagaaggagcctcttgggactcagacagggccagtcctgagcgaaggtacggaataggtgagtgaaccttgggaactccggaccctgttatctaccctcaatcacctgccacagggaggcagggaccccagcgtctttctcatatccccttttaaggaaatgctctgcttttgattttgcgcattttatttaagaatctttgtttcaactttcctggagaaatgaaaaatttggcactcctctaatcccagcgctttgggaggctgagaaggagtgggatcccttgagcccaggagtttgagacaagcctgggcgacataatgagacaccatctctacaaataccagaaaaatcatccaggcgtggtagcccatgcctgtattctaatctactcgggaggctgaagtgggaggatcacttgatgccatgaggccaaggtgcattgagccctgaatgggctaacgaactttaacctgattcacagaaaagaacctggggccaataagagagtatggacacaacaaacataggcgggccgccttataagatacaaagtttatacccctgttggaaaaaaattattttttttagtggcaccagatcactctgatcccgcgattttacagcagcgtcagggcaaacctcttctaagcactcccttcacccacgtcgtatcttcaacttcctatgatacatcaaccagtaaataccgccgtcctaacatcgaactgaatgctagttactacttctacagctgctaacaccttcataatatcgactccgtctcttttacattagactttgtaggtcaagctttaatctgcatctcc

SEQ ID NO: 27 - DNA, 917 bp, Homo sapiens
  CDS (254)..(466)
ccctgcaggtaccggtccggaattcccgggtcgacccacgcgtccgggattagtttaaattatcataaaagtgcttgaaaatctttaacttgcatgtaaatttggaattctgaaaaattcataaataccctgccagtatctatgaaaggaaaagctgcagatccgactatataccaataatccatttttctaaaagttcagagaaactctgtagctcattattcctgggatataaggtaatcctggctgggttatgaaatttcttctcatgtctcttccctatagacatctcttttgtatcactcaggctattctttctgaaatagctgaaggtattagaaacgatccattcaaattttatctttattctgttcttgcccttttcctccactattatatgtatgtttttgtttcaaggttcagtatctactacttaaagttacttagaatttttaagttttcctaatataaacaagcatttgaaagaaactactttaattgttatgatgactaaacttgtctcaaaccaaaaatatgcgctaaacactacgtagtaagaatgagaccagcctgggcaacatagcaagaccctttctctacaaaaaaaagtttaaaaattatctgggcgtggtggcacacacctgtggtcctagctactgggaggcggaaggattgcttgagcccaggagtttgaggctgcattgggctgtgatcacacaccgtggcactccaagctgggcgatagaaggaagatcgctctctacaaataaatacataaatacaatttgaaaagaaacgggagttgggaaccttgtcaagaggggcaactactagagaagccatttttaactattattccatacgtgaacaacccaggccgagatgtccctcccgctggcaacatgggatgcaaacac

SEQ ID NO: 28 - DNA, 703 bp, Homo sapiens
  CDS (285)..(509)
atacgactcactatagggaatttggccctcgaggccaagaattcggcacgagggctattacatagaaattttgtagaatctaataagataaactagaaacatgacatgttcagctgttttctctacgaataaacaaattggcgctaaaactggtcttgctatctagatttctagttatatctcagttatcttttccccacatgggatgtgaaagtaatgttatatgctttcttatgtacgtacttttgacttaggtcagtctccacactgcattaaaattactaatgagacaaattgcagttttccagaggttcatgtttccatttctccttccttggctttcctgcatttttagctccagtcaaaattctatttattatgtatcaacttttataaaatgcttggctttgaaaagtataattaaaagacaaagatctgaaattaatagggggtttttagctatctatcatgcattaagaaatcaagtgaccaggtgtggtggcctgtaatcctagcactttgggaggctgaagtgggaggaccacttgagctcaggagttcaagaccagcctgggcaacatagcaagaccctgtctctactaaaaataaaaaaaattgaccagggggggggtgcatgcctgtagttccagctacttgggacgctaaagggggaagactgctttaaccccccggggcgggagac

SEQ ID NO: 29 - DNA, 373 bp, Homo sapiens
  CDS (75)..(287)
actcgcccgtaattaccggggcgacccacgcgtccggagaactgtttgtggaaaacattggttcttaacaggacatgcatagcaggacaagaatcagattgtgtctgtgtaatgccaagaagagttgccagaagtacttatcatctttgaaattatccactttgttatcccctttgctgtttttgcctttttataccccatctcttaaaggatggggcatttttgttttgagtttttattttatgttaattatagccgactgtaacctgttcaaaataataatttaggagctcttctagagttgggaatgctgagaatttttaaaaattactaaaacttggaatagctttttcaaatgccaaagcagatttgg

SEQ ID NO: 30 - DNA, 665 bp, Homo sapiens
  CDS (408)..(566)
gtaccgctccggaattcccgggtcgacccacgcgtccgcggacgcgtgggcggacgcgtgggcggacgcgtgggctgacgttcttgtgatgttttcccatgcataaacatgccacatccatgttcttgggtcatcttttttgccctttcatggagtcataaattttcccaactgaagtcttgtatattctgttagattaattcctatttctagttgctgtaaatgatatcttatgttttattacatttctaataggatatggtgttggtgaaatgttaaccctctcattagatctactagtttacctgttgattctattgtgttttctatgtaaatgattttgtcagctataaataataacattttattttctctttccttgcaatacctatgctcatttattttttatgtttacccattggttagggcctcctgtatacattaaacagttcatagtcatgatagtgagtattcttacactgttcccagtattacagggaatgcttagaaattttctttatttaaacattatgtttgttgtagccttgttaaaggctattttataatttttactagaaatattttgacatttattgggatttttttctatctctaatctattgagataggcacattccttttgtctcactccattataaagggag

SEQ ID NO: 31 - DNA, 756 bp, Homo sapiens
  CDS (61)..(669)
gcatctattacatgattacgccaagcttggcacgagggcctgattcacagacgctacaggatggagcggggcgcaggagccaagctgctgccgctgctgctgcttctgcgggcgactggtttcacatgtgcacaggcagatggccggaacggctacacggcggtcatcgaagtgaccagcgggggtccctggggcgactgggcctggcctgagatgtgtcccgatggattcttcgccagcgggttctcgctcaaggttgagcctccccaaggcattcctggcgacgacactgcactgaatgggatcaggctgcactgcgcgcgcgggaacgtcctaggcaatacgcacgtggtagagtcccagtctggaagctggggcgaatggagtgagccgctgtggtgtcgcggcggcgcctacctagtggctttctcgcttcgcgtggaggcacccacgaccctcggtgacaacacagcagcgaacaacgtgcgcttccgctgttcagacggcgaggaactgcaggggcctgggctgagctggggagactttggagactggagtgaccattgccccaagggcgcgtgcggcctgcagaccaagatccagggacctagaggcctcggcgatgacactgcgctgaacgacgcgcgcttattctgctgccgcagttgaacggcgccgtcgccgccgctctctcccgggccaggaggctagtcccacctcttgctattaaagcttctctgagttgaaaaaaaaaaa

SEQ ID NO: 32 - DNA, 545 bp, Homo sapiens
  CDS (1)..(336)
atgaggcaagtggcgagagtgatcgtgttcctgaccctgagtactttgagccttgctaagaccacccagcccatctccatggactcatatgaaggacaagaagtgaacataacctgtagccacaacaacattgctacaaatgattatatcacgtggtaccaacagtttcccagccaaggaccacgatttattattcaaggatacaagacaaaagttacaaacgaagtggcctccctgtttatccctgccgacagaaagtccagcactctgagcctgccccgggtttccctgagcgacactgctgtgtactactgcctcgtgggtgacacacagtgagacagatgggcctgcacctgtgccgttttcctctgtggggtgggagtcacagcctagaaagaagtccaaaagtgctttctaaaatttttattttcaaaaggtattagcaaatttatgtattcttctactatttgcaaaatcaatcttatttattttttaaataggtatttcacttatgtgatctaaaattaaaaaagtataaaagggaa

SEQ ID NO: 33 - DNA, 493 bp, Homo sapiens
  CDS (31)..(414)
attgagggctgtgttataactatctattcgatgatgaagataccccaccaaacccaaaaaaagagatctctcgaggatccgaattcgcggccgcgtcgaccgcgcggggaaggggagacgtggggtagagtgaccatgacgaaattagcgcagtggctttggggactagcgatcctgggctccacctgggtggccctgaccacgggagccttgggcctggagctgcccttgtcctgccaggaagtcctgtggccactgcccgcctacttgctggtgtccgccggctgctatgccctgggcactgtgggctatcgtgtggccacttttcatgactgcgaggacgccgcacgcgagctgcagagccagatacaggaggcccgagccgacttagcccgcagggggctgcgcttctgacagcctaaccccattcctgtgcggacagcccttcctcccatttcccattaaagagccagtttattttctaaaaaaaaaa

SEQ ID NO: 34 - DNA, 1900 bp, Homo sapiens
  CDS (314)..(709)
  misc_feature (1)...(1900): n = a,t,c or g
atttggccctcgaggccaagaattcggcacgagcataaggttgtagtagcaggagccctctatcttttgttcgggnncatggaaggggtcctcanagcnnnngagactcagactgatcttgcttacttggcctttatccccttggctttcctagaccctggcttgcgcagctggatgcagacaacatccccccaccacccaagagggagggtagctcttccgccaccaggggcaagcacatttgtatcggcatttcaccaacacgcttattttggcagtggcagcatccattgtgtttatcatctggacaaccatgaagttcagaatagtgacatgtcagtcggactggcgggagctgtgggtagacgatgccatctggcgcttgctgttctccatgatcctctttgtcatcatggttctctggcgaccatctgcaaacaaccagaggtttgccttttcaccattgtctgaggaagaggaggaggatgaacaaaaggagcctatgctgaaagaaagctttgaaggaatgaaaatgagaagtaccaaacaagaacccaatggaaatagtaaagttaacaaagcacaggaagatgatttgaagtgggtagaagagaatgttccttcttctgtgacagatgtagcacttccagcccttctggattcagatgaggaacgaatgatcacacactttgaaaggtccaaaatggagtaaggaatgggaagatttgcagttaaagatggctaccatcagggaagagatcagcatctgtgtcagtcttctgtacggctccatgggattaaaggaagcaatgacatcctgatctgttccttgatctttgggcattggagttggcgagaggtgtcagaacaaagagaacatcttactgaaaacaagttcataagatgagaaaaatctacgagcttcttatttacaacactgctgccccctttcctcccagactctgacatggatgttcatgcaacttaagtgtgttgttcctgaactttctgtaatgtttcattttttaaatctgacaaactaaaaagtttaacgtcttctaaaagattgtcatcaacaccataatatgtaatctccaggagcaactgcctgtaatttttatttatttagggagttacataggtgatgggggaaattgttaactacctttcattttcctgggaagtcaaggttacatcttgcagaggttgttttgagaaaaaagggcccttctgagttaaggagccatagttctatcaatgatcaaaagaaaaaaaaaaaaaagagaaactgttacagtatgattcagatcatttaaaaaagcaaaatcaagtgcaattttgtttacaaatggtgtatattaaagatttttctatttcagatgtactttaaagagaaatattagcttaactcttttgacatctgctattgtgacacatcccattgctggcaatgtggtgcacactccgaaacttttaactactgttttgtaagcctccaagggtggcattgcagggtccttaggcaatgttttgtttgcctttatgcagagaggtgctccaagtgctgtgattgagcaccgtgctagaggaactgtaatgcttcagaagttgtagcttatacaaaggaaacaggtcctgctggcttaatttaaacagttattgcatgaagtagcgtggaggccctggactgctgctcgttctttaggatggactgttctggtatctggtattggtttagagactgttaataagggacatcacaaggtgatgggattcatttgaagcactctatttctgttttaatggttttatccaattttgccttcccaagatttttgttctacataaaaagttcatgccactttttaatataaaaaaatttaacaaaaaaaaaaaaaaa

SEQ ID NO: 35 - DNA, 1105 bp, Homo sapiens
  CDS (238)..(591)
tttgatagcagtaccattgtatatcgagacccaagctggctagcgtttaaacttaagcttggtaccgagctcggatccactagtccagtgtggtggaattcggcgtctctggggcaggtgttggctctggtgctggtggccgctctgtggggtggcacgcagccgctgctgaagcgggcctccgccggcctgcagcgggttcatgagccgacctgggcccagcagttgctacaggagatgaagaccctcttcttgaatactgagtacctgatgccctttctcctcaaccaggggggatcccttctctattacctcaccttggcatcgacagatctgaccctggctgtgcccatctgtaactctctggctatcatcttcacactgattgttgggaaggcccttggagaagatattggtggaaaacgagcagttgctggcatggtgctcaccgtgataggaatttcactctgcatcacaagctcagttccatggactgcagaactccagctgcatggaaagggccagctgcagactttgagccagaaatgcaaacgggaggcctctgggactcagtcagagcgctttggctgaatgaggggtggaaccgagggaagaaggtagagagctgtgagccccagccccacctgactccagcacacctggcgagtagtagctgtcaataaatctatggtaaacagacaagaggaggtggaaggccatacagaatggagccgtgagtatggccagcctccagctctcagccaggaggtccccaaccccaaggaaggaagaaactggaaattaggaactgcttcctcatttaacaaggtgcttcttttcatgtgatgaggccctgtgaagaagggacaggatatacagacgggggcagctggagacagttatgatgagtgccggctttgtgtctgagcattctgctcccatggacatccccaacaacagcagggaccaacctatgtcactgtcaaagggcagctgagagaggcctgagccccagggacccctcacctgatgggaatgagagtgtggggagcttgcttcttggctgaatggtctgctggggtctggcatagaaagcagatggctt

SEQ ID NO: 36 - DNA, 1379 bp, Homo sapiens
  CDS (439)..(720)
tttcgtgccatggcggcgtctctgagtaggtagccggccccgcccttccatggatttcccgaccctcgcctcgaattcatttcctgctccacatgcaccctctaaccccgacccctgctacaaccccagaggccggactcctggattcatctccctagcttccctgggcctgccttagccgccagtcgcagccgaggcgaagagagcgaaggagggaagtgggggcggctagctggggctagaaggccaggagagggcggggtgggcggccgtttggggtgggggtcagggtgactcactcgtctgcattcagggcaggtgttggctctggtgctggtggccgctctgtggggtggcacgcagccgctgctgaagcgggcctccgccggcctgcagcgggttcatgagccgacctgggcccagcagttgctacaggagatgaagaccctcttcttgaatactgagtacctgatgccctttctcctcaaccagtgtggatcccttctctattacctcaccttggcatcgacagatctgaccctggctgtgcccatctgtaactctctggctatcatcttcacactgattgttgggaaggcccttggagaagatattggtggaaaacgagcagttgctggcatggtgctcaccgtgataggaatttcactctgcatcacaagctcagtgagtaagacccaggggcaacagtctaccctttgagtgggccgaacccacttccagctctgctgcctccaggaagcccctgggccatgaagtgctggcagtgagcggatggacctagcacttcccctctctggccttagcttcctcctctcttatggggataacagctacctcatggatcacaataagagaacaagagtgaaagagttttgtaaccttcaagtgctgttcagctgcggggatttagcacaggagactctacgctcaccctcagcaacctttctgccccagcagctctcttcctgctaacatctcaggctcccagcccagccaccattactgtggcctgatctggactatcatggtggcaggttccatggactgcagaactccagctgcatggaaagggccagctgcagactttgagccagaaatgcaaacgggaggcctctgggactcagtcagagcgctttggctgaatgaggggtggaaccgagggaagaaggtgcgtcggagtggcagatgcaggaaatgagctgtctattagccttgcctgccccacccatgaggtaggcagaaatcctcactgccagcccctcttaaacaggtagagagctgtgagccccagccccacctgactccagcacacctggcgagtagtagctgtcaataaatctatggtaaacagacaaaaa

SEQ ID NO: 37 - DNA, 2084 bp, Homo sapiens
  CDS (215)..(1672)
aagctggtacgcctgcaggtaccggtccgtaattcccgggtcgacccacgcgtccggtcccccacggagacgcgccaaggtagccccgcgcgtgtccgtaggcgcgctctctggaagacgcggtggggggtgcgcagggctgcaccctcacaccaattgccccggcgaaggccgagcccagaaagtgagtgcgcgtgagtgtgcgcgcgcccgcatgcgggggcgtggcagtcaacagcaacaacccacacgccggcagggccagaaactcccatctccctcaccagccggaaagtacgagtcggctcagcctggagggacccaaccagagcctggcctgggagccaggatggccatccacaaagccttggtgatgtgcctgggactgcctctcttcctgttcccaggggcctgggcccagggccatgtcccacccggctgcagccaaggcctcaaccccctgtactacaacctgtgtgaccgctctggggcgtggggcatcgtcctggaggccgtggctggggcgggcattgtcaccacgtttgtgctcaccatcatcctggtggccagcctcccctttgtgcaggacaccaagaaacggagcctgctggggacccaggtattcttccttctggggaccctgggcctcttctgcctcgtgtttgcctgtgtggtgaagcccgacttctccacctgtgcctctcggcgcttcctctttggggttctgttcgccatctgcttctcttgtctggcggctcacgtctttgccctcaacttcctggcccggaagaaccacgggccccggggctgggtgatcttcactgtggctctgctgctgaccctggtagaggtcatcatcaatacagagtggctgatcatcaccctggttcggggcagtggcgagggcggccctcagggcaacagcagcgcaggctgggccgtggcctccccctgtgccatcgccaacatggactttgtcatggcactcatctacgtcatgctgctgctgctgggtgccttcctgggggcctggcccgccctgtgtggccgctacaagcgctggcgtaagcatggggtctttgtgctcctcaccacagccacctccgttgccatatgggtggtgtggatcgtcatgtatacttacggcaacaagcagcacaacagtcccacctgggatgaccccacgctggccatcgccctcgccgccaatgcctgggccttcgtcctcttctacgtcatccccgaggtctcccaggtgaccaagtccagcccagagcaaagctaccagggggacatgtaccccacccggggcgtgggctatgagaccatcctgaaagagcagaagggtcagagcatgttcgtggagaacaaggccttttccatggatgagccggttgcagctaagaggccggtgtcaccatacagcgggtacaatgggcagctgctgaccagtgtgtaccagcccactgagatggccctgatgcacaaagttccgtccgaaggagcttacgacatcatcctcccacgggccaccgccaacagccaggtgatgggcagtgccaactcgaccctgcgggctgaagacatgtactcggcccagagccaccaggcggccacaccgccgaaagacggcaagaactctcaggtctttagaaacccctacgtgtgggactgagtcagcggtggcgaggagaggcggtcggatttggggagggccctgaggacctggccccgggcaagggactctccaggctcctcctccccctggcaggcccagcaacatgtgccccagatgtggaagggcctccctctctgccagtgtttgggtgggtgtcatgggtgtccccacccactcctcagtgtttgtggagtcgaggagccaaccccagcctcctgccaggatcacctcggcggtcacactccagccaaatagtgttctcggggtggtggctgggcagcgcctatgtttctctggagattcctgcaacctcaagagacttcccaggcgctcaggcctggatcttgctcctctgtgaggaacaagggtgcctaataaatacatttctgctttattaaaaaaaaaa

SEQ ID NO: 38 - DNA, 484 bp, Homo sapiens
  CDS (39)..(392)
atttggccctcgaggccaagaattcggcacgagcttatatggttaaaacagacgcacacctaaaaaaccctccctttgctccctttagggtttatacattgaccctatcattgttattgaaattgtcacattactcttgtctttgggttaaaaaagactttaaagactcctcgttttacaatagcaataataatagcaatagcaatcattgtaaatctttattgagcactcactatatgccaggcgctgtaattagtaatttatgccttatctcatgtaaagtttccagcagccctattaagcagacacatggcatttccatgttacagatgaagagactgaaacacacattagctcgccttgccccagggacacatggtgggagccagaactaggagttgagcccaggcatactgatgcctggtgcacttggacgctgctgtacagccactccaggtgtggatgagcaggaaacacattgaag

SEQ ID NO: 39 - DNA, 2259 bp, Homo sapiens
  CDS (182)..(1078)
ggcggagttttaatcgagggctctctaatgtaagccttgcgaaccgccccggaaatcccgggtcgacccacgcgtccgggttccacctggcggctggctctcagtcccctcgctgtagtcgcggagctgtgtctgttcccaggagtccttcggcggctgttgtgtcagtggcctgatcgcgatggggacaaaggcgcaagtcgagaggaaactgttgtgcctcttcatattggcgatcctgttgtgctccctggcattgggcagtgttacagtgcactcttctgaacctgaagtcagaattcctgagaataatcctgtgaagttgtcctgtgcctactcgggcttttcttctccccgtgtggagtggaagtttgaccaaggagacaccaccagactcgtttgctataataacaagatcacagcttcctatgaggaccgggtgaccttcttgccaactggtatcaccttcaagtccgtgacacgggaagacactgggacatacacttgtatggtctctgaggaaggcggcaacagctatggggaggtcaaggtcaagctcatcgtgcttgtgcctccatccaagcctacagttaacatcccctcctctgccaccattgggaaccgggcagtgctgacatgctcagaacaagatggttccccaccttctgaatacacctggttcaaagatgggatagtgatgcctacgaatcccaaaagcacccgtgccttcagcaactcttcctatgtcctgaatcccacaacaggagagctggtctttgatcccctgtcagcctctgatactggagaatacagctgtgaggcacggaatgggtatgggacacccatgacttcaaatgctgtgcgcatggaagctgtggagcggaatgtgggggtcatcgtggcagccgtccttgtaaccctgattctcctgggaatcttggtttttggcatctggtttgcctatagccgaggccactttgacagaacaaagaaagggacttcgagtaagaaggtgatttacagccagcctagtgcccgaagtgaaggagaattcaaacagacctcgtcattcctggtgtgagcctggtcggctcaccgcctatcatctgcatttgccttactcaggtgctaccggactctggcccctgatgtctgtagtttcacaggatgccttatttgtcttctacaccccacagggccccctacttcttcggatgtgtttttaataatgtcagctatgtgccccatcctccttcatgccctccctccctttcctaccactgctgagtggcctggaacttgtttaaagtgtttattccccatttctttgagggatcaggaaggaatcctgggtatgccattgacttcccttctaagtagacagcaaaaatggcgggggtcgcaggaatctgcactcaactgcccacctggctggcagggatctttgaataggtatcttgagcttggttctgggctctttccttgtgtactgacgaccagggccagctgttctagagcgggaattagaggctagagcggctgaaatggttgtttggtgatgacactggggtccttccatctctggggcccactctcttctgtcttcccatgggaagtgccactgggatccctctgccctgtcctcctgaatacaagctgactgacattgactgtgtctgtggaaaatgggagctcttgttgtggagagcatagtaaattttcagagaacttgaagccaaaaggatttaaaaccgctgctctaaagaaaagaaaactggaggctgggcgcagtggctcacgcctataatcccagaggctgaggcaggcggatcacctgaggtcgggagttcaagatcagcctgaccaacatggagaaaccctactgaaaatacaaagttagccaggcatggtggtgcatgcctgtagtcccagctgctcaggagcctggcaacaagagcaaaactccagctcaaaaaaaaaaaagaaagaaaagaaagctggagctggtggcttaggccatcacccttcccttggctggaactactggacagacccttttgagatgtgcctgtggtgctgtggagatgtgtgtagtggtcttagctctttgttgagcttgtgtgtgtgttgtgtagtcttagctgtatgctgaaattgggcgtgtgttggagggcttcttagctctttggtgagattgtatttctatgtgtttgtatcagctgaatgttgctggaaataaaaccttggtttgtcaagaaa

SEQ ID NO: 40 - DNA, 777 bp, Homo sapiens
  CDS (1)..(777)
atggggacaaaggcgcaagtcgagaggaaactgttgtgcctcttcatattggcgatccttcctgagaataatcctgtgaagttgtcctgtgcctactcgggcttttcttctccccgtgcagcttcctatgaggaccgggtgaccttcttgccaactggtatcaccttcaagtccgtgacacgggaagacactgggacatacacttgtatggtctttgaggaaggcggcaacagctatggggaggtcaaggtcaagctcatcgtgcttgtgcctccatccaagcctacagttaacatcccctcctctgccaccattgggaaccgggcagtgctgacatgctcagaacaagatggttccccaccttctgaatacacctggttcaaagatgggatagtgatgcctacgaatcccaaaagcacccgtgccttcagcaactcttcctatgtcctgaatcccacaacaggagagctggtctttgatcccctgtcagcctctgatactggagaatacagctgtgaggcacggaatgggtatgggacacccatgacttcaaatgctgtgcgcatggaagctgtggagcggaatgtgggggtcatcgtggcagccgtccttgtaaccctgattctcctgggaatcttggtttttggcatctggtttgcctatagccgaggccactttgacagaacaaagaaagggacttcgagtaagaaggtgatttacagccagcctagtgcccgaagtgaaggagaattcaaacagacctcgtcattcctggtg

SEQ ID NO: 41 - DNA, 1683 bp, Homo sapiens
  CDS (515)..(1333)
tgcttactttttccctgcaatgggaagcctctcctcactctggggagatctaatccaggttgggaagatgggactgcagaggccagctgcctctatgctgccctattcgacttccaatcagccagctgcctctacactgccctattcgacttccaatcagccagctgcgtctacactgccctattcgacttccaatcagccagctgcctctacactgccctattcgtcttccaatcagccagctgcgtctacactgccctattcgacttccaatcagccagctgcctctacactgccctattcgacttccaatcagccagctgcgtctacactgccctattcgacttccaatcagccagctgcctctacactgccctattcgacttccaatcagccagctgcgtctacaccggaagcctaggaggctgggccggagggaggcggaggaaccggtgttcgccgccgccgctgcttcagcttattccttgtggcctctgcgggtcctgcctcagccatgatgatccacggcttccagagcagccaccgggatttctgcttcgggccctggaagctgacggcgtccaagacccacatcatgaagtcggcggatgtggagaaattagccgatgaattacatatgccatctctccctgaaatgatgtttggagacaacgttttaagaatccagcatgggtctggctttggaattgagttcaatgctacagatgcgttaagatgtgtaaacaactaccaaggaatgcttaaagtggcctgtgctgaagagtggcaagaaagcaggacggagggtgaacactccaaagaggttattaaaccatatgattggacctatacaacagattataagggaaccttacttggagaatctcttaagttaaaggttgtacctacaacagatcatatagatacagaaaaattgaaagccagagaacagattaagttttttgaagaagttctcctttttgaggatgaacttcatgatcatggagtttcaagcctgagtgtgaagattagagtaatgccttctagctttttcctgctgttgcggtttttcttgagaattgatggggtgcttatcagaatgaatgacacgagactttaccatgaggctgacaagacctacatgttacgagaatatacgtcacgagaaagcaaaatttctagtttgatgcatgttccaccttccctcttcacggaacctaatgaaatatcccagtatttaccaataaaggaagcagtttgtgagaagctaatatttccagaaagaattgatcctaacccagcagactcacaaaaaagtacacaagtggaataaaatgtgatacaacatatactcactatggaatctgactggacaccttggctatttgtaaggggttatttttattatgagaattaattgccttgtttatgtacagattttctgtagccttaaaggaaaaaaaaataaagatcgttacaggcaggtttcactcaactgctgtttgtactgtctgtcttcacattcatattccagatttatattttctggagttaaatttggatgatttctaaattatcacaaagtgggacctcagcagtagtgatgtgtgtgtctcatgagcagtgagcacagtctgcattcatcatgaaacactatcttctaccaggaggaggttaatgtaa

SEQ ID NO: 42 - DNA, 2010 bp, Homo sapiens
  CDS (351)..(1058)
cttgacagtcctccagtaagagtgagtagacccgctgtcgaatgggacggtaaatgaaggcctggctgggtaaggcctggtcaagctcatcttctagggtgttgctgcattcaatctctccactgctcatgatgttgtacaccaggtagctttctgcttggacgtgatgtgttctagcaacctttaagatttcagtgtctgaaaccatggttacttgttgctttacttcaggccccacatttgtggggtcttcttgtttaatttcagggtttgtacacatgagagcttctagcttaaattcaaaatctgttgctacaggtaatttttgattgatttcagcgtgtgtacacatggagtcttcttgcttggatataggatctgtacctatgggaacttcctgtttggattcatggcctgtacacataatttcttgcctagattcagggtctgtccgtattaaaacttcttgcctggattcagggcctgtatacatgggaacttcttgcctggattcagggcctgtatacatgggaacttcttgcctgggttcagagcctgtatacatgggaacttcttgcctgggttcagagtctgtacacatgggaacttcttgcctgggttcagagtctgtacacatgggaacttcttgcctggcttcagggcctgtacacatgggaacttcttgcctgggttcagggcctgtacacatgggaacttcttgcctgggttcagggtctgaacacatgggaacttctcgcctggattcagggcctgtacacgtgggaacttcttgcctgggttcagggtctgaacacgtgggaacttcttgcctgggttcagaatatgtatacacgggaacttctcgcctggattcagggcctgtacacatgggaacttcttgcctggattcagcatctgaacacatgggaacttcttccctggattcggcgtctgaactcgtggatattacttgtttgtccaaagttattacacctttgggtttttggaaaaaccatggagatttttgtcctggtaaaagatatgatgccattcctttataaaaaagagctttgtttggtcccagaggtaatatctcttctaattttttctcaccttgatacaagtaaagaactttcgatatatggtctgacacagctaatatgatgttaccttttttgtcaaagttctcttttacagaggtgtaggacgataagcatttgtacctaaagctttcaaacatgccctctgggattatgtcgttgccaaggaggcaggccagaagaggaaggtcggccacacagaggcccagactctcacagagcttctctctgcagagcatgacggtgtccaggctctctaggcagagctcgctaattgaaaagtagggacaagtgtcatagattaggtaatcagtgtcttcccccagaatcccaagacagttatgctggaggccataggaagctacctcataatctgcttcctgcaaggaacacaaagtttcctggcccagtgtctttagagcaaatcgtgtaaacacagctagccctgaggggatgaagaacatatttctgcctggctgctccttgtgtgacttgatgtaatgaaaaatcctggatatctccctgttgttcttgagccttcgtttcacccattcatctctcttatcctgctccaccatgccatcaaagaagaatatcaacttgatcccagctgccgtaaaagttttaacaaaatctcgcaaagcagaaaagtattctcgccactggccaccgcagatccaagattctggagtataccaatatctgagacaacacatggcatcaaccacaatggtaggggtacatccaggatacttgcttcggtggtgctctgccagttctttgaaatttactactgtacatatatgtgggcaggtacttcccacaaatccttgcaaacctctcacacccataactgaactccgggaaaggatcaagctctgtgctggctgctgcaggcccaggagagccc

SEQ ID NO: 43 - DNA, 2253 bp, Homo sapiens
  CDS (533)..(1204)
tcaggcactggggctgcggcagcaacatgcgctgaccacggccatccttctgtctcttttctctctccactgctgtggacctggaatggtcatctgcagcggcctgacgaggtccgggtgcctcagtgggttcccaggatacacaaaccactccttgacagctaggcaggtgctggtgacatcttgacagtcctccagtaagagtgagtagacccgctgtcgaatgggacggtaaatgaaggcctggctgggtaaggcctggtcaagctcatcttctagggtgttgctgcattcaatctctccactgctcatgatgttgtacaccaggtagctttctgcttggacgtgatgtgttctagcaacctttaagatttcagtgtctgaaaccatggttacttgttgctttacttcaggccccacatttgtggggtcttcttgtttaatttcagggtttgtacacatgagagcttctagcttaaattcaaaatctgttgctacaggtaatttttgattgatttcagcgtgtgtacacatggagtcttcttgcttggatataggatctgtacatatgggaacttcctgtttggattcatggcctgtacacataatttcttgcctagattcagggtctgtccgtattaaaacttcttgcctggattcagggcctgtatacatgggaacttcttgcctggattcagggcctgtatacatgggaacttcttgcctgggttcagagcctgtatacatgggaacttcttgcctgggttcagagtctgtatacatgggaacttcttgcctgggttcagagtctgtatacatgggaacttcttgcctggcttcagggcctgtacacatgggaacttcttgcctgggttcagggtctgaacacatgggaacttctcgcctggattcagggcctgtacacgtgggaacttcttgcctgggttcagggtctgaacacatgggaacttcttgcctgggttcagaatctgtatacacgggaacttctcgcctggattcagggcctgtacacatgggaacttcttgcctggattcagcatctgaacacatgggaacttcttccctggattcggcgtctgaactcgtggatattacttgtttgtccaaagttattacacctttgggtttttggaaaaaccatggagatttttgtcctggtaaaagatatgatgccattcctttataaaaaagagctttgtttggtcccagaggtaatatctcttctaattttttctcaccttgatacaagtaaagaactttcgatatatggtctgacacagctaatatgatgttaccttttttgtcaaagttctcttttacagaggtgtaggacgataagcatttgtacctaaagctttcaaacatgccctctgggattatgtcgttgccaaggaggcaggccagaagaggaaggtcggccacacagaggcccagactctcacagagcttctctctgcagagcatgacggtgtccaggctctctaggcagagctcgctaattgaaaagtagggacaagtgtcatagattaggtaatcagtgtcttcccccagaatcccaagacagttatgctggaggccataggaagctacctcataatctgcttcctgcaaagaacacaaagtttcctggcccagtgtctttagagcaaatcgtgtaaacacagctagccctgaggggatgaagaacatatttctgcctggctgctccttgtgtgacttgatgtaatgaaaaatcctggatatctccctgttgttcttgagccttcgtttcacccattcatctctcttatcctgctccaccatgccatcaaagaagaatatcaacttgatcccagctgccgtaaaagttttaacaaaatctcgcaaagcagaaaagtattctcgccactggccaccgcagatccaagattctggagtataccaatatctgagacaacacatggcatcaaccacaatggtaggggtacatccaggatacttgcttcggtggtgctctgccagttctttgaaatttactactgtacatatatgtgggcaggtacttcccacaaatccttgcaaacctctcacacccataactgaactccgggaaaggatctagagatgcgccaacaccagccgcagacgcgcccgctgcaccctaggcccaaccgcctcagccaccgccacacgaaatcgtcgacccgggaattccggaccggtgcgtgcaggcgtacagctatcagtcgaggg

SEQ ID NO: 44 - DNA, 1800 bp, Homo sapiens
  CDS (144)..(1046)
gtggccctaccctgacgtcctcgcgcactgcccggaattcccgggtcgacccacgcgtccggttggaagaagtacccagtccatttggagagttaaaactgtgcctaacagaggtgtcctctgacttttcttctgcaagctccatgttttcacatcttccctttgactgtgtcctgctgctgctgctgctactacttacaaggtcctcagaagtggaatacagagcggaggtcggtcagaatgcctatctgccctgcttctacaccccagccgccccagggaacctcgtgcccgtctgctggggcaaaggagcctgtcctgtgtttgaatgtggcaacgtggtgctcaggactgatgaaagggatgtgaattattggacatccagatactggctaaatggggatttccgcaaaggagatgtgtccctgaccatagggaatgtgactctagcagacagtgggatctactgctgccggatccaaatcccaggcataatgaatgatgaaaaatttaacctgaagttggtcatcaaaccagccaaggtcacccctgcaccgactctgcagagagacttcactgcagcctttccaaggatgcttaccaccaggggacatggcccagcagagacacagacactggggagcctccctgatataaatctaacacaaatatccacattggccaatgagttacgggactctagattggccaatgacttacgggactctggagcaaccatcagaataggcatctacatcggagcagggatctgtgctgggctggctctggctcttatcttcggcgctttaattttcaaatggtattctcatagcaaagagaagatacagaatttaagcctcatctctttggccaacctccctccctcaggattggcaaatgcagtagcagagggaattcgctcagaagaaaacatctataccattgaagagaacgtatatgaagtggaggagcccaatgagtattattgctatgtcagcagcaggcagcaaccctcacaacctttgggttgtcgctttgcaatgccatagatccaaccaccttatttttgagcttggtgttttgtctttttcagaaactatgagctgtgtcacctgactggttttggaggttctgtccactgctatggagcagagttttcccattttcagaagataatgactcacatgggaattgaactgggacctgcactgaacttaaacaggcatgtcattgcctctgtatttaagccatcagagttacccaacccagagactgttaatcatggatgttagagctcaaacgggcttttatatacactaggaattcttgacgtggggtctctggagctccaggaaattcgggcacatcatatgtccatgaaacttcagataaactagggaaaactgggtgctgaggtgaaagcataacttttttggcacagaaagtctaaaggggccactgattttcaaagagatctgtgatccctttttgttttttgtttttgagatggagtcttgctctgttgcccaggctggagtgcaatggcacaatcttggctcactgcaagctccgcctcctgggttcgagcgattcttctgcctcagcctcctgagtggctgggattacaggcatgcaccaccatgcccagctaatttgttgtatttttggtagagacagggtttcaccatgttggccagtgtggtctcaaactcctgacctcatgatttgcctgcctcggcctcccaaagcactgggattacaggcgtgagccaccacatccagccagtgatccttaagaga

SEQ ID NO: 45 - DNA, 5588 bp, Homo sapiens
  CDS (386)..(3292)
cacaaatctgtgattacctggcgggtgaaccgctccggtggcggggagagcgggctcccagcgctgggtaggggccgggttccggcgagcgccatcccggagcgtcagtttcccagtttgggaagtgaggagaacctgcctcgcccttccccgccaaggcttagggaagggactatggcagttccaagaggaaatcagggtctcgctctgttgctcaggctggattgcagtggcgtgatcatgcctcactgcagcctcgacctccctgggctcaagcaatcctcccacttcagcctccagagtggctgggaccacagtgtggctgtccagctgggctgagtcgcccaagaaggacgtgacaggtgccgacgccaccgccgagcccatgatcctggaacagtacgtggtggtgtccaactataagaagcaggagaactcggagctgagcctccaggccggggaggtggtggatgtcatcgagaagaacgagagcggctggtggttcgtgagcacttctgaggagcagggctgggtccctgccacctacctggaggcccagaatggtactcgggatgactccgacatcaacacctctaagactggagaagtgtccaagagacgcaaggcccatctgcggcgcctggatcgccggtggaccctgggcgggatggtcaacaggcagcacagccgagaggagaagtatgtcaccgtgcagccttacaccagccaaagcaaggacgagattggctttgagaagggcgtcacagtggaggtgatccggaagaatctggaaggctggtggtatatcagatacctgggcaaagagggctgggcgccagcatcctacctgaagaaggccaaggatgacctgccaacccggaagaagaacctggccggcccagtggagatcattgggaacatcatggagatcagcaacctgctgaacaagaaggcgtctggggacaaggaaactccaccagccgaaggcgagggccatgaggcccccattgccaagaaggagatcagcctgcccatcctctgcaatgcctccaatggcagtgccgtgggcgttcctgacaggactgtctccaggctggcccagggctctccagctgtggccaggattgcccctcagcgggcccagatcagctccccgaacctacggacaagacctccaccacgcagagaatccagcctggggttccaactgccaaagccaccagagcccccttctgttgaggtggagtactacaccattgccgaattccagtcgtgcatttccgatggcatcagctttcggggtggacagaaggcagaggtcattgataagaactcaggtggctggtggtacgtgcagatcggtgagaaggagggctgggcccccgcatcatacatcgataagcgcaagaagcccaacctgagccgccgcacaagcacgctgacccggcccaaggtgcccccgccagcaccccccagcaagcccaaggaggccgaggagggccctacgggggccagtgagagccaggactccccgcggaagctcaagtatgaggagcctgagtatgacatccctgcattcggctttgactcagagcctgagctgagcgaggagcccgtggaggacagagcctcaggggagaggcggcctgcccagccccaccggccctcgccggcctcttctctgcagcgggcccgcttcaaggtgggtgagtcttcagaggatgtggccctggaagaggagaccatctatgagaatgagggcttccggccatatgcagaggacaccctgtcagccagaggctcctccggggacagcgactccccaggcagctcctcgctgtccctgaccaggaaaaactcccccaaatcaggctcccccaagtcatcatcactcctaaagctcaaggcagagaagaatgcccaggcagaaatggggaagaaccactcctcagcctccttttcctcatccatcaccatcaacaccacttgctgctcctcctcttcctcctcctcctcttccttgtccaaaaccagtggcgacctgaagccccgctctgcttcggacgcaggcatccgcggcactcccaaggtcagggcaaagaaggatgctgatgcgaacgctgggctgacctcctgtccccgggccaagccatcggtccggcccaagccattcctaaaccgagcagagtcgcagagccaagagaagatggacatcagcactttacggcgccagctgagacccacaggccagctccgtggagggctcaagggctccaagagtgaggattcggagctgcccccgcagacggcctccgaggctcccagtgaggggtctaggagaagctcatccgacctcatcaccctcccagccaccactcccccatgtcccaccaagaaggaatgggaagggccagccacctcgtacatgacatgcagcgcctaccagaaggtccaggactcggagatcagcttccccgcgggcgtggaggtgcaggtgctggagaagcaggagagcgggtggtggtatgtgaggtttggggagctggagggctgggccccttcccactatttggtgctggatgagaacgagcaacctgacccctctggcaaagagctggacacagtgcccgccaagggcaggcagaacgaaggcaagtcagacagcctggagaagatcgagaggcgcgtccaagcactgaacaccgtcaaccagagcaagaaggccacgccccccatcccctccaaacctcccgggggctttggcaagacctcaggcactccagcggtgaagatgaggaacggagtgcggcaggtggcggtcaggccccagtcggtgtttgtgtccccgccacccaaggacaacaacctgtcctgcgccctgcggaggaatgagtcactcacggccactgatggcctccgaggcgtccgacggaactcctcctttagcactgctcgctccgctgccgccgaggccaagggccgcctggccgaacgggctgccagccagggttcagactcacccctactgcccgcccagcgcaacagcatccccgtgtcccctgtgcgccccaagcccatcgagaagtctcagttcatccacaataacctcaaagatgtgtacgtctctatcgcagactacgagggggatgaggagacagcaggcttccaggagggggtgtccatggaggttctggagaggaaccctaatggctggtggtactgccagatcctggatggtgtgaagcccttcaaaggctgggtgccttccaactaccttgagaaaaagaactagcagagggcctgggctcttccagcctcagtgtgcctctctggccgcccactggatgagcggtgagacgaacaaaagggaaaggaaaaaatgggggtggggggtggggggtggacaacattcaacactgcagaatgggtgacctcaaagatgccccctgtccaagccatcccacagctggaaggtaggggatgggggtgcccacactgagtgaggaagggaatggaccagggagtcccaggcctgggacccagagccaagtaagctgagatatcctgtgcaccatagggacttcaccaatggattacatgccatctgggacaggccatgtgggagaccccagttgtgcctttgctacagatctggaaaagacaaggtcatgggggcctccagtgtcctgcccctgcttggcccagttttgattgctggcatcttgccaccccaggtatccctggtattgtcctaagctgtatttgtgaattgtgctggtttcctgggcattgccacgcctaccacaggtgggtacattagaagccaccactggctttcaggcttgggggtgtcttctgagctcaagcctgcttctgggccaggccattgtcactgttagttgaagaaaaagcagttcccaggtgccagcaaagaccatctttcataactgtcactgtcttggccttgagaagagagcccgctctccgtggggcaccccatggaggacacagtaccagagtttacagagagggtgggcgaagccaccggtctcttcctaatctgcacagactattttgggtatttctgggcgggcagttcctttgcatgtttcgggagaggtttgttgatttggggcttatatgtcaggcctttggtttgcgtcttattttaggggttgtttgggggcctgggtggtcggcctcacatgggaaggagatgggtagtggatggggtttctgttgtatcttgtgggcgggtgattttgcttttgtttttgtttcacattcttccccctccacaagccaaagtcgtttcatttggtttccactgtgtggactgtgctggagcttggcgcctgccagaaaaatttggggctaggcaagccccaggttgcagacatggtgaagcagagaaactgttcttctggttcctgcacaacctcagaggggcaaaaaccctccccaggaaggaggagggtgttcaggagccagacttttggagagaaggcagctcccagcctgctgggtgaccgccattctgcgtgtgttccccagctgggcagggctggaagccttacgtatgaagcatggagaagcagccattgtccccactatgggcagaggggggacccggctggccccttgggtcagactggagccaacaccgccagccaccccctctggcctgctggcaatgccacaggtgcccaagaagatggaggatccctgtgccaggagccaacctggtcttcccgagggtcagtgccccagtgaagacagaagcgagagaataaagttccctgtaggtcctctgtcacctttgggttgtgtttttcaattgttgacatttcagaggggaccctccagaagcccagccggcttcccccaaggactcccccttcgctgggagtggatttccacacgtgcctttgatttcggacagattgggcctcacagccaccgattcagctgccagggtccctggactgggggttggtgttttctatagaggaggaaaggccctccctcaccctgctccccacccaggcagggcagcatgggacccagtgtctcagtgccttcaaaacccacccccacccctaccctaccccaccacaccccatcccagaggccttgcctgggcaaccctaagcccctgtccctcgccatacactgatgcctggcagctagagcaaatggctcgtgttctttgtcgaaggcctgtggtgagattgttttgtttccttttgttttgtgagtttgtttaaaattgaaattagttattttcttctgctggacagtattaaatagagcaggatgttgagttaatctgctagattgcagtactaatggtagtggtttagtgtcttcatgttaatattatttgtacttatttgaacaataatgataaagaagtggttcattattttttaattaatgcactttaaataaggtagaatggaaaaaacccagagagcaaagtgcattacttaaagatgcagtatatacttttctcatttttaaacagcacatatttattaagagaaaaaaagtaatttatgactatttaaaataaaatttaaaagtag

SEQ ID NO: 46 - DNA, 754 bp, Homo sapiens
  CDS (194)..(532)
ttcatgatgtatataactatctattcgatgatgaagataccccaccaaacccaaaaaaagagatctctcgaggatccgaattcgcggccgcgtcgaccactactctgttaaattcctcaaacttgtaatgccccaaggcttgattttttccagataatggctctatcgttgcacataccctgattctgtcagtatgtgtcattggcaaaatagctttctctgccaaagctttctgacctttggctccatcttagctttgttagcaggaaaggcctgctacccagagtcagagtcaatcagagaattgttcatgtggtccttagaactttactccttacccttttatcttttctttaaactttcgcctctaaatctgccagggaaattgggacttatagaaaccttgtcaacttgtttgggtcaaaaattagatcctgtgttagaaactctgcaaagagtgagatccatggcatcattgatcgccaacttctttgttcctttcatccagaagaaaggtcagctcattacgtaagaaacttttcatcaggaaaagcagacaaccgataaaaaacagaaactaagtattctgcaaggaaacctggtttaaggagaatgtattgaaactggatatgcctgttcctttttactcctccctttggcatttcctttttttttctgtaagataatcatagaaatttaggtaatggcgggactacaaagatcacatggctttatgggcccgcctattatgctg

SEQ ID NO: 47 - DNA, 859 bp, Homo sapiens
  CDS (23)..(715)
cagcatcggaggtcgctcagccatggcatggatccctctcttcctcggcgtccttgcttactgcacaggatccgtggcctcctatgagctgactcagccaccctcagtgtccgtgtccccaggcaagacagccagcatcacctgctctggagataaattgggggataaatatgcttcctggtatcagcagaaggcaggccagtcccccgtgctggtcatctatcgacatagcaagcggccctcagggatccctgagcgattctctggctccaattctgggaacacagccactctgaccatcagtgggacccaggtcatggatgaggctgactattactgtcaggcgtgggacagcagcatcgtggtgttcggcggagggaccaagttgaccgtcctaggtcagcccaaggctgccccctcggtcactctgttcccgccctcctctgaggagcttcaagccaacaaggccacactggtgtgtctcataagtgacttctacccgggagccgtgacagtggcctggaaggcagatagcagccccgtcaaggcgggagtggagaccaccacaccctccaaacaaagcaacaacaagtacgcggccagcagctatctgagcctgacgcctgagcagtggaagtcccacagaagctacagctgccaggtcacgcatgaagggagcaccgtggagaagacagtggcccctacagaatgttcataggttctcaaccctcaccccccaccacgggagactagagctgcaggatcccaggggaggggtctctcctcccaccccaagcatcaagcccttctccctgcactcaataaaccctcaataaatattctcattgtcaatgaggtc

SEQ ID NO: 48 - DNA, 1612 bp, Homo sapiens
  CDS (43)..(1464)
tttcgtgggatctcagggcttcattttctgtcctccaccatcatggggtcaaccgccatcctcgccctcctcctggctgttctgcaaggagtctgtgctgaggtgcagctggtgcagtctggagcagaggtgaaaaagcccggggagtctgtgaagatttcctgtaagggctctggatacagctttagcgactactgggtcgcctgggtgcgccagtcgcccgacaaaggcctggcgtggatggggatcatctatcctggtgactctgataccaggtacagcccgtccttccaaggccaggtcaccatctcagccgacaagtccatcagcaccgcctacctgcagtggagtagcctgaaggactcggacaccgccatgtattattgtgcgagaggtgcccgaggaaccgcgccctcctaccactactacggtttagacgtctggggcagagggacctcggtcaccgtctcctcagcctccaccaagggcccatcggtcttccccctggcaccctcctccaagagcacctctgggggcacagcggccctgggctgcctggtcaaggactacttccccgaaccggtgacggtgtcgtggaactcaggcgccctgaccagcggcgtgcacaccttcccggctgtcctacagtcctcaggactctactccctcagcagcgtggtgaccgtgccctccagcagcttgggcacccagacctacatctgcaacgtgaatcacaagcccagcaacaccaaggtggacaagagagttgagcccaaatcttgtgacaaaactcacacatgcccaccgtgcccagcacctgaactcctggggggaccgtcagtcttcctcttccccccaaaacccaaggacaccctcatgatctcccggacccctgaggtcacatgcgtggtggtggacgtgagccacgaagaccctgaggtcaagttcaactggtacgtggacggcgtggaggtgcataatgccaagacaaagccgcgggaggagcagtacaacagcacgtaccgtgtggtcagcgtcctcaccgtcctgcaccaggactggctgaatggcaaggagtacaagtgcaaggtctccaacaaagccctcccagcccccatcgagaaaaccatctccaaagccaaagggcagccccgagaaccacaggtgtacaccctgcccccatcccgggaggagatgaccaagaaccaggtcagcctgacctgcctggtcaaaggcttctatcccagcgacatcgccgtggagtgggagagcaatgggcagccggagaacaactacaagaccacgcctcccgtgctggactccgacggctccttcttcctctatagcaagctcaccgtggacaagagcaggtggcagcaggggaacgtcttctcatgctccgtgatgcatgaggctctgcacaaccactacacgcagaagagcctctccctgtccccgggtaaatgagtgcgacggccggcaagcccccgctcccccgggctctcgcggtcgcacgaggatgcttggcacgtaccccgtctacatacttcccaggcacccagcatggaaataaagcacccaccactgccctgggcccctgcaaaaaaaaaaa

SEQ ID NO: 49 - DNA, 664 bp, Homo sapiens
  CDS (205)..(348)
gtcgaggtccggaattcccgggtcgacccacgcgtccgaccaggaatacaaagatgagtttgagcatcatcctttcgggaaatgtaaatacctaaagcaaaggattctagggcaactgtttttcttccccattatcaactccataaagagtcttttctgacttctttttcaattgtcccctcctggccttttaataacatagatatgctgggtatctgtttatgttctatatgtgtacttagactttgtttagaaaagagtaagatttttccacctccaagaaccagtgatcactcccttgagggctctgtcacccctgtggagaatgcagcacggtcaggcatgtaaaagggtctcttaccgggtcctctttcaggtgggggacttagattagtagataatccttcctgggccacgggcctcatgactggtcagtagtgttgccagatttcacaaactgtatatatagaatgtccagttaaacttgaatttcagacaaacaaatccttttttaagtaaaagtatgtcctatgccatatttagacatcgtttgttgtatctggcaatgctacttgtaaggatcctactcttctgaggatagaaagtgcacttcccattaagtaagaattttcattaacaggaagaacgtgagcctccatttaat

SEQ ID NO: 50 - DNA, 1001 bp, Homo sapiens
  CDS (257)..(805)
ggtaccggttcggaattcccgggtcgacgatttcgtgctgacagggccgcatcggcttaccccaccttactttatctgaacgcgcctaagctgctgcagctggcacccggttgcgctcggcgaagagggctgggggcgggagatgacggtggtcttttccctgcttggcaccctgcgagcaccatctccctttttctcgccactccaaggttgcagacgaagcatagatctggttggagttggagggtgagagaaaatgaattctaatttacctgcagagaacttatccattgcagtcaatatgaccaagactttgcctacagcagtaacgcatggatttaattccactaatgacccaccttcaatgtcaattacaaggcttttttcagccttactggaatgctttggcattgtcctttgtggctacatagcaggaagggccaatgtcataacatcaacccaggccaaaggactaggaaattttgtctccagatttgcacttccagctttattattcaaaaacatggttgtacttaatttttccaatgtggactgggccttcctatatagtatcttaattgccaaagcttctgtatttttcattgtatgtgtattaaccttattggttgccagtcctgatagtcgatttagcaaagctggactattccctatttttgctacacaaagtaatgactttgcattgggataccctataggtaagttaatttttatttttcaagtgtttaaaaaattcaattttaatttatttaggcatttgttagtaacagattcttactctcatatctaagaagtttttcatttttttctcaaatatgtcttaggatgaatcatagtttttcctaaacttcagagtttgaggatcctttaaacatctacctaaaataaacgggcatattctaataaccccctgtgaacaggcccaaattggaatttttttcttcccgggaagcacatatgaaaagaagcttatattttttaga

SEQ ID NO: 51 - DNA, 499 bp, Homo sapiens
  CDS (182)..(499)
gcttacccttagggtttggtgggtagctcaattcttgaagctccataacatccattttcctattatgagcagaggaaataaacatgcagatggcttggtttccttcgcataacttgtacaggggtaggtagcataaaagacagccgttctcaagaggcaaccatgcgcctcactacttaccatgttcctgcggggcatcccctcccgtagggagtctctgaaaacaaacacacacagaagttggcggtgggcaccacattctcctcttgacctaaccatcaggaatttgctgtgccatctgttcataaaacttagccaggcccagaaagcttgtcccaaccacatgctaagagccaagcagatggaacagaagctcccccaagctgctggctcccactatggctgggatgaagcaagaacctgggcccacacaggctgcaaggcagcggacgcgtgggtcgacccgggagttccggagcaggaccttccagcgttcaat

SEQ ID NO: 52 - DNA, 738 bp, Homo sapiens
  CDS (52)..(393)
atttggccctcgaggccaagaattcggcacgagcgggaaccacgcacggttatgagctcatggtttctgagggccgggcatggcctcatctgggtcctcttcttcaggattggtcaggctgcagtcggagtgtcagctgggcctggggggtcacccaaggcccacctggggagagtggcttcccagcaccctcatggggcagagagcagggcctgcctccttgcacgtggcttgcctaaggccctgagctccatgctggctgttgactgcaggccacgctcagggcctctccatcgggcggctcacatcatggcagcaagcctcatcagcaagccagtgagagggtgcctatccgaggatgatattccatcacctctgtcagattctgcttactagtcagtccccaggcccaggccactcgcaaggggaggacattacaggaggcgtgagtataggtggtgtgatctgtggggaccggcgcataggctgcccaccacatggggttaaaacctataaaacttcgaagctgaatttaattattttcgaacactaggaaataaataaggatcgctgtttctggccttcccagaacactatagggtgggattggatactatattcccccttaattttgtaaaaggggaaagcatgccctttcgatgccaacaattcacggggccttacagggaaaccttccaaccccccacgggagggcttttacttcccatccggtgcgcg

SEQ ID NO: 53 - DNA, 748 bp, Homo sapiens
  CDS (461)..(616)
atttggccctcgaggccaagaattcggcacgagctctggcagacgagcataagaatccacattttaaacaagcattccaggtgattctgatgcaaggtgatttggggtcttgaagcctcacacttacagaaactgctctcttttgcatttatgaacctggctgttgaaggcttcagatcacatgcttggggatggtagatactagtggggatcatctgactccagactgggaatcttctcgttacaggatgaccccaatcacttaggtttacttctggatcttgataattccttgatagtcctcttttactgatgtctcttacggcccttaagaaggcagagaaggggttaactgaggccacagaatagagagagtgaaggaactgaagggtcattttacagagtgactggggtgtggcccagtcctccagtaggtgcccagagccagtccaaaattagaatggggtgggattcaaaactgcttttcctattcacttgcctttcatgtgtaaccacatgcagtgtgtcaacatgctttcaggcgccattaggcagcagcagttttgctccctctgggttcatggacgcttggtattcctgttatgtgttggcttagaatagctctgcgctctggggctctgagcattgtccattaactctttcagcaccagccctttgagatgctaagggcttttgaatgaaatgtaataaccaccacgccgagccctatgcagtctcaaaaaaaaaa

SEQ ID NO: 54 - DNA, 539 bp, Homo sapiens
  CDS (48)..(368)
attcagcctccagagcaccagcactggcactggcactggcacacgctatggcaaatgaagtgcaagacctgctctcccctcggaaagggggacatcctcctgcagtaaaagctggaggaatgagaatttccaaaaaacaagaaattggcaccttggaaagacataccaaaaaaacaggattcgagaaaacaagtgccattgcaaatgttgccaaaatacagacaccggatgccctgaatgacgcactggagaagctcaactataaatttccagcaacagtgcacatggcgcatcaaaaacccacacctgctctggaaaaggttgttccactgaaaaggatctacattattcagcagcctcgaaaatgttaagcctggatttaaaacacagccgtctggccagctgcctcgaatatctgacagcttagcaaaaagggccaaagctttccataggcgtgctgcacttgcttggtaaattaagcagcttttgtatcttcccctttgactttaggtaataaagcatccaaacttgtaaatctg

SEQ ID NO: 55 - DNA, 558 bp, Homo sapiens
  CDS (212)..(499)
gccctgaagaacctctacatgagtgaggtggagattaacttggaagacctactgggagtgctggcttccgcccacatcctccagttcagtggcctgtttcaaaggtgcgtggatgtgatgatagccagactcaagccaagcaccatcaagaaattctacgaggccggctgcaaggttatttacctttagtgaattccatcttctgaaaacaatgcttttgtgggtcttcttgcaactgaactacaagattcaggcaattccgacttatgaaaccgtgatgacattttttaagagctttcctgagaactgttgctttctggaccgggacataggacagagcttgaggccgctcttcctctgcttgcgtctgcacggcatcaccaaaggcaaggatctgaggtgctgcggcaccttaacttcttcccagagtcatggctcgaccaggttacagtcaaccattaccacgcactggagaatgggggcgacatggtccacctgaaagatcttaacacccaggctgtgagatttgggctgctctttaaccaggagaatacaact

SEQ ID NO: 56 - DNA, 1340 bp, Homo sapiens
  CDS (1)..(1098)
  misc_feature (1)...(1340): n = a,t,c or g
atgttgtattgggtggttatacatttcggcgcaagggggcccggagggcgccgaaaacggcgaacgacaaacggggagggccggaatgcggcaaggcacgccgggaaagagggaaacccgcgaaagcccacgggcaacgcccaaacccccatggacccaaggaaacgtaaaaagggaagtctgaccccgggaccaaatagacgccaacaggaaagcgagggcgcaaggagacaatcgcgacggggagagaacgggagcgaagcagcccagagccccagccggggaacggaacggaaggcaaccaagagggtgaaaagaaagcaagacgtcaccgggaatgacccacatagcccttctttgtcttcgggaggtcccatccataaagccaacacttccggaagattaaaggtgtcggacagggggacagctgagaggagaggaggatttcttgccaggtggagagtcttcaccgtctgttgggtgcaggcctgtgtctgtcctggaaagatgctagcaatgggggcgctggcaggattctggatcctctgcctcctcacttatggttacctgtcctggggccaggccttagaagaggaggaagaaggggccttactagctcaagctggagagaaactagagcccagcacaacttccacctcccagccccatctcattttcatcctagcggatgatcagggatttagagatgtgggttaccacggatctgagattaaaacacctactcttgacaagctcgctgccgaaggagttaaactggagaactactatgtccagcctatttgcacaccatccaggagtcagtttattactggaaagtatcagatacacaccggacttcaacattctatcataagacctacccaacccaactgtttacctctggacaatgccaccctacctcagaaactgaaggaggttggatattcaacgcatatggtcggaaaatggcacttgggtttttacagaaaagaatgcatgcccaccagaagaggatttgataccttttttggttcccttttgggaagtggggattactatacacactacaaatgggacagtccctgggatgtgtggctatgacttgtatganaacgaccatgctgcctgggactatgacaatggcatatacttcacacagatgtacactcagagaggacagccaatcctagctttccataaccccacaaggcctaaaattttaaaaatggccatccaagcgggtcatttcccactgggaggtccctgggagggatttcgaacacttaccgggcccttattcaacattaaggggggggaggattgggccccccccccccccc

SEQ ID NO: 57 - DNA, 1786 bp, Homo sapiens
  CDS (1044)..(1382)
tagggagaagtgccaacatatttgcagtttattttcaaatggttcagaggctgtctgtgtacatgagaagacaaagataaggcaaatgcagcaaaattgtaataattggtgaatccaggtgaagggactatggctggtctttgtacttttttttccaacttttctgtaggtttaaaattttcaaaataaaaaatgggaaatactttaaaaattgtaatcaaagacattagtacagaaactttcataatgtattttatttttacagtaaaattaatttatgtaaattgatagaattttactaatttcactcccaagttacattaaaaggcttacatatgtttgataatagcatatgtaaactagaactctgaatgatatccattggtcataatacgtactatgtagcggtaatggtgacttttgtgattgcacaagtctagagatgccccaaatgacattgacttagacatctggttattctaaggctgaaactgaagttgaatagaaggttttagtcaaatactgagatgaaaactgaggcagtcctggcgggggggagtgagtgtgtgtgtatatatacacacatagacatcatgcttctaaacatttacagaaagaaagggtagattatctacaaaaaaataagaatcagactgatatgagatcttacaaacctaacccccttctctttcctaaactccagattctcatatttctgacttcctatttgatatttacacttcgatatttaccaggagtcttcaacattttgttcaaaacagtactcttggttttcttcctccaagactactccttactcatatcagcaaatagcagctcttttcaagtgctcagtgtaaaaacctacaattaatccttgatttctctttcagtcagcctatactaaatcaatttcatttaaaatatctcggctactactctgcatctccactgctaccatcggcctctccagtcacattctccaagagcactctatctcatttaaaagacaaaatctctgcagtggcctgtgatgctccttaatggcctacataatccagccctcaagcacctccgtgatctctgtaaaactttcccttggtcactgtgcttcagccacattaaccagcttgcatatttctcacattcaccaagcttgttcctgccttggggcctttgtacttaccatgttctgttctgagaatactctgcctcaagatatcctacaactatcttactgtattcagctctctgctcaagtattaactgatgaaacctgtcatccctactccactccatgttctgctttacttaacagcaattgcacatatggccccctgaataatatacatttagtcacttatttttacttatctgctaattaaaatgtagactttttctattctgtttactgctgtattcccagcatgttttatccgaatgtgcagtggtttcttttcttctcccttatcgtgggaagtgatgtgcacaaatacacataatggagcctgaatgtcatattgctttcatacctgtgtgaattttggtaagaaaggaaaagtagcgattgacaggtaatataattacattaagtcactctcatagttagctgtttattgctttcctgctcttattctcagtccccaggaccaaatgttgaccactaccttcccccacatataattaggttatttaccgaacgccatgcaggtggctgttaaaaggaagatatatacttacaatataaacacaacttttccctgttgtctttctgtctcacacgaaa

SEQ ID NO: 58 - DNA, 665 bp, Homo sapiens
  CDS (370)..(510)
tttagatacgcctgcggtaccggtccggaattcccgggtcgacccacgcgtccgcatttttttgtgttgtcagtaatttccttataaagatagtaattttctctaaatcaaatcttatcatgacttctaacattctgtaaaataatttgagagtactagttaactaattcacaaactttaaattagtagtttattttcagttaagcacacaagaaagaaatatacagtctatctataatgaaatcttagttgactagatgggttgtggtgtcttaaaaattcccataactgatcacatggcttttaaaataggaagtctgagatttttttgttttcctcaactatatcctttttaacaagttctattttatggatctttatgtagtgattttttggttagtatacatattctctacttacataatcacatatataaaaggtaatgtgggactgtgttttcaaatcttatttcagctaagttttgagagaagaccaaaatcagtaaggtaagctgagaactaagagtagaaagtttaaactagagcaggggccaagtttaggagcagccacaacttttcttgcacatcaacttagttgtaacaatttagtttgaaagaaaatctggaacataatactcagtttgtaaaattgaagttggtagaatt

SEQ ID NO: 59 - DNA, 968 bp, Homo sapiens
  CDS (231)..(581)
ccccaaacacttagctggctccccatgacttaagtgtgttctcttgtgtcctatggaatccagttctgaagaggtgggggaggacaactgtgggaaaagccctgggggcccctcccaaggccccatcagtgctctgagtaggctgtcatcagaacaaagggctccactgctgacaaggtttgagaactgctggcttgaggtgagaacccctttaacctctgcgggacagcatgtctttccctatccaccttcgattcttttctcttttttttcttcattggctccttcttagtggattctcttctctactgccctgggcttcagcctttgtgcagtactctcgatgccctgaacacacaccttccctttgcccaggcggtgcaaacaatccacttcttcaagctccaacacaaatgctgcctcctttaggatgcctgctctgtgctctccctgcctcccctagcccatacctctgctggcaccttctgtaccatgccttcagaaaccttcttatccccctcatctctggggccccctgtggatctggcatacccaagttcagtaaatgtctatcagtaagctgatggtacatgcattttctaaaatagagctgggacttcccatggggcccacatctgacctggcagcccatgtattccggccattagggatgggaagccatgaggacctggccttctgcccgacccaggcagccattcaaggtgagcaatggccacttccaagactcaagtgcacctggaccctgcccaacaggcccccccaggaaaaacaggctgtccctggcggcagtaagtagcaggcggcccaaggtttctggagctcttggttttggcccaacccccccacccaaaatactgggttaggacaggggacttgtagctccccctcagtgacctttggccctggggccaagccccctggattgggattcggggaacgctccagtc

SEQ ID NO: 60 - DNA, 762 bp, Homo sapiens
  CDS (522)..(635)
  misc_feature (1)...(762): n = a,t,c or g
ggcccaaaaaaaaaaataccccccgctgttttgtggggtgtnttcttntgnggggaagacagggtttcccttttttttgcccccggggtggaaggccaaagggcaatttcccccaggaacccctgcccctcccgggggccaagggtattcttcccacctcagcctcttgagtagttaagaaggacaggtttaagcgcccatgccaagctaattttggtatttgtatagaagacgaggtctcattatcttccctaggcttttcttgaaagtcctgagctcaagttaatctgcctgcctcagcctcccaaagtattgggattacagatgtaagccaccacacttggccaattatggtaattttgtaagttaaagtatacctgtaaagctttgttcccttcaggtaattggcttgaatttgattttgttagtgaaggatgaagtcaaggaccattggggttgctctgtaaaatgaggagctgtttgggaaataggtcttaacactaatgtgattcaagaaggaaatggcagacacagcagaaaactcaagatataatgtgcatattccccacagatggaccatcaacaagtttttcattttaatgcagtcatctctttcctattcatgtctctattattaaatctctggtattggggttcctcaaagaatagccttctgagctctatgggctgatctcatcactaactcctatagcagttaggataatcactctcgtgccgaattcttggcctcgagggccaaat

SEQ ID NO: 61 - DNA, 805 bp, Homo sapiens
  CDS (264)..(434)
gttcagcactcccgggtcgacccacgcgtccggtctttagtatatataatattaaaaatggctatatatggaattctatctgagaattattatatggttaaattcaaatcctggctctcttcctttgtcttagtagatgggtccttcttttattataactagagttttaagttttcttttattagggcatttgaataaaaaacaatcattgtagaagtataattaattaataactagtaatcttatgtcatcttgagggaatcatgctgggatggcaaatctggagactgaggccacaactcctctccttccatacacaggacagatgtcactggtctatcacatctcaatgctctaagccagagtcccaagaatccttcttaagcaccatccatctattagagggagcacaggaggggacacccactgaatgactattcaaacaatttcttaaagaatatgcaatgcataataaggggttgagatacagaatgctactttactaaaatactacagtgtaagaatgtatagaaaaaagcacatgctttggagacttaaaggcctgggtatgaatcatggctctgacattaacaaacctcacctcctctttaaaagagtaataatgattggtatctcattgagctccgtaaactaaaaactacagagtaagaagggggggcccttacaaaagctttggagggggacaaacctgcggctgagtcatggctctgactttatctcccatcaccgcctctctaaaagataaaaaggattgtttggcatggagctttttattaggaaagaa

SEQ ID NO: 62 - DNA, 800 bp, Homo sapiens
  CDS (126)..(341)
  misc_feature (1)...(800): n = a,t,c or g
ccggaattcccgggtcgacccacgcgtccgaaaagaaggtaataaattaaaaagatcatttacagagatagcctggggtgataagagtttaaagttttgatctttttgttcatcttaaaaaaattatgatatatgtattctctctagctcacagtcttctcattttcaaaatgagagaaacagggatactattatgtttcttatcagcattaaattatataacccttgtgacatcccaaaaattgattctatccaaaaaaatgcatgttaatcattatttgccaaaaaagacaatctccaaatttctttattttgtaaaagtattccatgacctagtcctatagagcaggtgaatattggagattgttttctctgtaactttactatcatctacctatcttcgtattttggtgagagatcatgaaaccctctatcaaactctctttatgcagtaagttataacaaattagcactggcttataaagatatatcaaattagagtaaaatgcaactgaaaatatcataaatcattcggtaattaatgttttcttaaattcttggggnaagtacaagagaagaaattggagatgtgcagactttaaatgacctaaacagtcttacacaggagtttttgcagtatggtaagaaggaggtggctacttatgttttcaaaaagcacatgacctcatgaaaagtatgcaaggctatactgtcgacggtagaaaaacgagagacagagaataatttaaagaaccttcccatgttaggcgtgaaaatgaaaaggcttaaatttaggtgcc

SEQ ID NO: 63 - DNA, 524 bp, Homo sapiens
  CDS (249)..(425)
cggccgcgtcgacaaacaaaacaaatgaaaaattcacatctcaaaatgtctggggcagggcattctgactctgagctcaacatagcttctcccttcacttagcccttctcagttcaacccaaaagctatacacagaaaagctgcttaatttataacattttttgaaagcaggtcactgaattactactgacagccacgtgaatttctgccagggtaagtggaaaaaagtgaccaaaagggagaaccaaatgagtgtgcaggcatccaggggagcgggtcagcacagcacactagatgaaaaaggctcggaaagatctctgtcgtgtgcagacggtttccatgtctgtttaaatgacaacacgaacagcagaaaaatagagaaaaccagtaaatcagttgcttcatctccatcataccgcgaggtctgactacctttatttcaaggaatcagttgaatcagtcgacgcggccgcgaattcggatcctcgagagatctctttttttgggtgtggtggggtatcttc

SEQ ID NO: 64 - DNA, 480 bp, Homo sapiens
  CDS (27)..(347)
tgccgggagggtttttttgaaaccgtatgtcgtactccactccagcttggcacgagggatgtaggtacgagaatacagaatacgggtgttttctattaagcacacacattacagagatttgcaaaaatgttacaatgctgctcttctcactaaactttttcttttggaaaatagtcatgtttcataaaaatgtaatatttatattaacatgtaatgggtttattattgttacttttaaatggattgataaatttattttaaatatttctattttaatttctaacacagtaaatgttaatagccataatccacataaacaaaagttctttggggatctcagtaatttttaacagcgtaaaggggtcctgagaccaaaaagtttgagaactgctgcaatcaactataaagagtaagtttgccctgaactgcattaactggtatactttttctctgtctttgatcaataagggcttaaatatg

SEQ ID NO: 65 - DNA, 1013 bp, Homo sapiens
  CDS (82)..(765)
  misc_feature (1)...(1013): n = a,t,c or g
atggaccctgttgctacccacagctgccatctgctccagcaactgcatgagcagcgaatccaaggcctgctttgtgactgtatgttggtggtaaaaggagtctgctttaaagcgcataagaatgtcctggcagcattcagccagtattttaggaatgttcagcagatgcacagcagaacaaaacgttggatgaatcgcatccgcatgcttcaccatcagttaatcgtcatcactccgcaggtgaaatctcaaaacaagctcctgatacttcagatggcagctgcacagaactgcctttcaaacagccaaattactattacaaactcagaaacttttacacctgtgaatgactctgccccacaccctgagtcagacgccacatgccaacaacctgtcaagcagatgaggctcaaaaaggccattcatctgaagaagctcaatttcctgaagtcacagaaatacgcagagcaagtatctgaacccaagtcagatgatggtttgacaaagaggttggaatctgctagtaaaaataccctagagaaagctagcagccaaagtgctgaagaaaaagaaagtgaagaagtcgtcagttgtgagaattttaattgcattagtgagacggagaggcctgaagacccggctgccctggaagaccagtcccagacacttcagtcccagagacaatacgcgtgtgaattatgcgggaaaccttttaaacacccaagcaacttggagcttcacaaacggtctcatacaggtaactgattcagtacccacaggcagaagggaaggacgtaatgcggatgctcagacaccactggctcttcttgtttttgtaagaagttttgctgttgtttgatgtcattgatgattttaaacgtcgacgcggccgcgaattcggatcctcgagagatctctttttttgggtttggtggggtatcttcatcatcgaatagatagttatatacatcatcgccnngcaattccaaanncnccccccctctttaanntcg

SEQ ID NO: 66 - DNA, 3283 bp, Homo sapiens
  CDS (180)..(1469)
tgcggatgccccccaattgaacgccttcaggtagagcgccgtaaggcaccggcccggaattcccgggtcgacccacgcgtccggagatgccggaccgctccttcccagctcctccccgtgctcgctaacacagcacggccgcctgcagtctcctctctgggagatcgcgcgggcctaagatgtgtcctggggcactgtgggtggccctgcccctgctgtccctgctggctggctccctacaggggaagccactgcagagctggggacgagggtctgctgggggaaacgcccacagcccactgggggtgcctggaggtgggctgcctgagcacaccttcaacctgaagatgtttctggagaacgtgaaggtggatttcctgcgcagccttaacctgagtggggtcccttcgcaggacaaaaccagggtggagccgccgcagtacatgattgacctgtacaacaggtacacgtccgataagtcgactacgccagcgtccaacattgtgcggagcttcagcatggaagatgccatctccataactgccacagaggacttccccttccagaagcacatcttgctcttcaacatctccattcctaggcatgagcagatcaccagagctgagctccgactctatgtctcctgtcaaaatcacgtggacccctctcatgacctgaaaggaagcgtggtcatttatgatgttctggatggaacagatgcctgggatagtgctacagagaccaagaccttcctggtgtcccaggacattcaggatgagggctgggagaccttggaagtgtccagcgccgtgaagcgctgggtccggtccgactccaccaagagcaaaaataagctggaagtgactgtggagagccacaggaagggctgcgacacgctggacatcagtgtccccccaggttccagaaacctgcccttctttgttgtcttctccaatgaccacagcagtgggaccaaggagaccaggctggagctgagggagatgatcagccatgaacaagagagcgtgctcaagaagctgtccaaggacggctccacagaggcaggtgagagcagtcacgaggaggacacggatggccacgtggctgcggggtcgactttagccaggcggaaaaggagcgccggggctggcagccactgtcaaaagacctccctgcgggtaaacttcgaggacatcggctgggacagctggatcattgcacccaaggagtatgaagcctacgagtgtaagggcggctgcttcttccccttggctgacgatgtgacgccgacgaaacacgctatcgtgcagaccctggtgcatctcaagttccccacaaaggtgggcaaggcctgctgtgtgcccaccaaactgagccccatctccgtcctctacaaggatgacatgggggtgcccaccctcaagtaccattacgagggcatgagcgtggcagagtgtgggtgcaggtagtatctgcctgcggggctggggaggcaggccaaaggggctccacatgagaggtcctgcatgcccctgggcacaacaaggactgattcaatctgcatgccagcctggaggaggaaagggagcctgctctccctccccacaccccacccaaagcatacaccgctgagctcaactgccagggaaggctaaggaaatggggatttgagcacaacaggaaagcctgggagggttgttgggatgcaaggaggtgatgaaaaggagacagggggaaaaataatccatagtcagcagaaaacaacagcagtgagccagaggagcacaggcgggcaggtcactgcagagactgatggaagttagagaggtggaggaggccagctcgctccaaaacccttggggagtagagggaaggagcaggccgcgtgtcacacccatcattgtatgttatttcccacaacccagttggaggggcatggcttccaatttagagacataaaacacaggcagatcaagtagcattgatcaatggcatgattccaactcagatttgtgggacaccaaagcccaggatcttcccaagtgccctgctgcagtttagcaggtcctctccagctaaagagcagtgagacattgggagcccaggagtgttgaggccaggccaggctgaggcccatcagtcacaggtgtgactgggctgcttgtcacacacagggcgtggtctggccactgttgccagtgctcactcagcggccaaatgctttttaatatgacccctgaggcactgaaaaataaccccaggccaactgcaggatagagagagaggtcaggacagcagccctgtgggctgcatgatacactgtggctggagttattgtgaccccctggtgcagtgctcccacggccagtggtgcacacagggccattcactgtccatagactgaaaccatgtgaccatttgagagggccgggcacactttcccctgagggatggggcagcctgtggccagcacctctgcagttactctgcatagccagctcaccagcatgccatgcccagggtgccccccagtgacaacctcatgggagacgggcctggatttgaatttgttggaattaaatgtgctctggctttggtctttgaaacatatctatttttattccttggtgacatgtccttaagtgacaagactccagccttcctgggcgaggcctctccagcctcggaagagctgcagtccttatcggcgatcactggctctgcctgcatttgccggctctcttgagtcacgtgcatcccagcaccccgcctgggctcggactgtgggaccagactcagcctccccgaacacaagggaagataaggcttccatttgctctgtgtttcaccctctcctctgtctctccaggccacacatggaacggggcggtatgaggaagagtctgaaagtggtgaagagtgcacctatggccctctgacctccagccagagcagggcctaggggaggcttagagaggccagggcctctccccgtggttgaagctcccatttatttaagaaaaagtggggggtggggaaaacgttatgttaaatgtttacatggaaccaatgaacaactttaacacacaaatacaacgaaacattcttgtttaattactggcgttatagaaaatatgaattcctgctacatgccgggcagtgtagtgttacaatgctattccaagttgggtgttgagcatcttctttcagtcctggtggtgtgcttctgtgcctgcttgaaaatttcactaggaaataaagtcaaatgtctaaaaaaaaaaaa

SEQ ID NO: 67 - DNA, 1327 bp, Homo sapiens
  CDS (187)..(354)
  misc_feature (1)...(1327): n = a,t,c or g
gacttcggcacgagaatagctgagtttacaaagatgcattaaatagaaatagaacgcaaaggaaatcccagccattaccatgaacaaaatggtaagttacttctactagaactttactgactttaagctagagagaaagagaaagagagaggtaaaacaaaaatcaaaaaggaaaaggctcagatcatgttcggcatgatcaagaggagggtcagaagagctgtttttgtgggccgcaccgtgctctgtggatcttgtaactctgggattattatgcaccgtggcaagactccacccctgaagatggtctgccgatttgaagaatcattttcttgcttatttttaaactcttaaagacagggaaaaagactgaaggagcctaaatgctgtggtttcctcaaaccattattgttgtaaatcctatgggtcctgaagtaactcactattcctgaagtttcaaactgcctcacgactcagaagccttggcagttgaaagggaaattattagcttcttccttgaaacgttgtcactaaggttaaagggggacaaaaggtggtgaatgtggggaatttcaaaagtaaactaccttttttatagaaaatccatagctctttacagaactttgaggttttcaaatacttagttggggtgaaaacacattattttacaccagtaggccttacagaaattaaatattacaataatggattccattatctatggccacattaccagaagcctggacgtttaccttggggcacgttcgctttatatgctaggagtgcctgcggaattgatccttgggcttgacggaaacgagcgattatagctccgctatcgcggaaaaacgcctgcgcggcggcccgcgcccacccgcgtgcctttaatgcgggcgctcacgcgcgtcctctcgccgccgcgtagacgcgtgcccttccgcggggaaatcgcccccgggctcccgcgtcactccctccgtnttgtgcgggtgggtcgcgctctcgtccgtgtccggcggaacatgtccgcccgggggggtcccgccgccgggactngcggcgctggcttgccggcgttcgtcatccagccacgccgtgcgntaatggacgccgcgcatcgctcaccacgcgcatcgcngcngcnccgcttactgtgcggttccccccgccctcgcnccgatacagaaagaacccgaccccccccgctatattgtcgttgtctggctcgacgtgccgacgtgttccgccccccgcaagcgtcgggttgacactacgctcgctacttgtggaaacggcggcgcgtgggtgtccctccgctcgccgcgct

SEQ ID NO: 68 - DNA, 580 bp, Homo sapiens
  CDS (22)..(168)
ataacagggcaagtcacagccatgggattccttttccttctggattctgccctcatgcagacttgggttacagtaatagatgtaagtctgcatcatgtagagatcaaagccccaagaataaggctcatgtggtccctacccttgaggagacaaaaatatacgatgtagatggacagctgcattatgcacacagatccatttcaatataacatggtgggctactctgggaacactcctgctccacaaggagcagtataaaaaaataaattaatcaaattttaaaaaagcaacatggtagatcctgggcgcttagagagtactgctcaagtgctatgagaacacttgggcagagatatctacccagacatgggagtgacgtggttgagaaatctgatcctacactgctaacacctctgtctggagaagttgctggaggcttccaagatggggcctgtgggataaacaaactttaccgaatggaaaagatgaaaaggaattggaggccaagagaacagcaagtacaaagacacagagttttaagtacttcctcgtgccgaattcttggcctcgagggccaaat

SEQ ID NO: 69 - DNA, 1391 bp, Homo sapiens
  CDS (162)..(482)
aattcggcacgagcagcagccatggccacctgcatgccagtccttcgtgtattgctgcgtatgagcgcccttccttggatgtggatttccatgacatggcctttctcaccttccttacttcctgtcctgctatgtattgtgtcctaccatgaattcactccatgctagccacattggcctgtatggctattccttggacacacctaggatgttcttgcctcttagcttgcctacctttctctcatcatttgggcctcagcgaggatatcatctcctcagagaagccttctgtgaccatgctatctaaaatactccagcacttcagtcaccctttatcccattactctgctttttcagaaacattggtgctccctgaaacatatttgtttacttgcttagtgtcttttctcccgcactaccatgtaagcttcttgagggttagggaccttgttagggataaccactgtatccttagagtgtgacacatagtaggttctcaatacatatttttgaaactctaccctgatgcaaaagagatatcaaataattatagtttttgcattataaatgtctttggtgaaatccctggcacaaaactaataataaagaaataaacagataatggtgagttctgggcctgcaaacctaactctttaaagcagtcacagtaaatgtgtcattggatccatagaacttgggaagtcagcatattttattgggaaaagcatgaacttcaaagtaaaacttatggtcaaatctcattactggtgcgttcttaagtcatttaacctttgagccacaaggtacacaaatgtgaaattagaggaataatagtgactccataagaccctcaagaaaaggaaataaggtattgtagcccgatgatccttatcacatggctaacaaattagggggtctaaaattctggtatgggcatacccggaaacacgtcacgcatgtaggggcctactaagaaaagaggttccttgagtcgggaccagggacgttatgcgaaatggcgggaactggaggccgcggggatgggccacgtcgagcattcgccggcatcggggattgggggaacccgggcggttcgtgcgcggggggcgggaacggggggcgcgtgagcgaagagggagcatcggcggctacggcgcgcaaccgggcgagcagcaccggcagtggcgcaatatacgcggagcagctcccatgtaacggcgcagtttgtgcgcatccggcggaagtagggcgaagaccacgtcggtgcgcgggaaactcgcgcgcactcgccggcgacaacggcacgggcaccgccggactagggggccaccgcgcggtgcacctgctggctcgtcggcgagaacgcgggcggataattcgcggaccgagcc

SEQ ID NO: 70 - DNA, 684 bp, Homo sapiens
  CDS (122)..(262)
atgactctcattgattacacctgtctctacaacgactcatctatagggaaagctggtacgcctgcacgtaccggtttctaattcccgggtcgacccacgcgtccgctgtaatgaattaaagatgcatacacctcatctaccaaatatcatagtgtattttatcctactctacatatgctcacaatacttatatttacttacaattaggcataatcatctaacacaaagcctattttataataaattattgagtgtcttgtaatttattgaatgctgtacgttgtgacaaaattgcaatggtttggcaccatcataaatttggaaaatcatttagtggaaccttcataagttgggaactgtttgtatacctataagtggaattattcggtcatagagtatgcgtatcttcaacttgagtagatttgcaaatggttttccaaagtggctataccaggttatatcaatttacattctaaccagcagtgtttaagagttctggtgctccacatctcaaacatatatatatatgtgtatagagggagagagagagggagagcgagagccacagagagcgcatgttttcatatgtccctgctaactctttcttgcagaatgactgatcattttttctaattgatatgtaagatttctttgtatatctccaaatcaataacctttatgggt

SEQ ID NO: 71 - DNA, 545 bp, Homo sapiens
  CDS (187)..(396)
ctagagagcgtggggaattccaggattgcccacttgggaccctgactatgaagggtcaagatagcccattctgccccagcactcagagccctattaccaaggcccctactccaagaatccaccatcaaaaccggggccctgccagtgccttcccagtgttcaggcctagggaagaatagccccattatgcctgttactcctgatccttctgcagtctctctctttgtgaccccatggcctttgctgctatgtctgccctggccccacagagtgccaggtcagagccaccctggcctacatagcagggccccggttcacaggctaaaacctgggcctcctgccaggctgcaactcccagctgcacaccgcaacctgagacatctcagcatattctaggaactagtaatggggacgcttccgactcgctggggaagggagatgagggcctctagctctccatgcccagtctctcatcatcaaagtcatttaaggccccagcgaccccagggttcagcagcatcctgttcatcatgagcaagagggtg

SEQ ID NO: 72 - DNA, 471 bp, Homo sapiens
  CDS (34)..(243)
tccctagtccagtgtggtggaattcaaaacatcatgtcatggtatacttgtcagtgtctcttctttctcagcaacacattaaggaatggtgctacttcttgccattggtattgtagccctgatgacatgcagatggttgatttcagctcaacatacgaaaggattttcaggccatttgtgttcaagataaaagggcctgacagctttaggatagacatgagccccatccctgaagacatttaatcacaatctagacaagctcttgttgtaaatgagctcaagtatcagatttggaagtgaatgatcttttacatttttgtcaagcttgaggttcgtgaacttggatccaacctcttattttttgcagataagaaaacaaggatcacaccagttgagagatttctccgaagtcagacatctcattagagctagagaggccagactagcatgtctcccatgatccagtctgaa

SEQ ID NO: 73 - DNA, 856 bp, Homo sapiens
  CDS (118)..(567)
  misc_feature (1)...(856): n = a,t,c or g
aggaggtttctncattgaacgccttcggtaccggtccggaattcccgggtcgacccacgcgtccggcggcgctgcgcgtgcgttgttgagtgttcgggacgccggcctgcaggcgccatggtcttcctcaccgcgcagctctggctgcggaatcgcgtcaccgaccgctactttcggatccaggaggtgctgaagcacgccaggcacttccggggaaggaaaaatcgctgctacaggttggcggtcagaaccgtgattcgagcctttgtgaaatgcaccaaagcccgatacctgaagaaaaagaacatgaggaccctctggattaatcgaattacagctgctagccaggaacatggactgaagtatccagcgctcattgggaatttagttaagtgccaggtggagctcaacaggaaagtcctagcggatctggccatctacgagccaaagactttcaaatctttggctgccttggccagtaggaggcgacacgaaggatttgctgctgccttgggggatgggaaggaacctgaaggcattttttccagagtggtgcagtaccactgaggactgttgctgtattgattaggaaaagagacagagtaatttgcagtttgtttgatttatacttttgtttatctacaacccaataacagacatgagggatggccctgtctctctgggacagagcctcaaagatgatgtccatgttttgtgtgaatgaaactcaaacactcttcagtttttagagtcattttctggtatcgagcgaccacaccgaggagcacaccctgcttccaaggctgctgccttctgacacagtggggggatccccacccaccctggctcccctcaa

SEQ ID NO: 74 - DNA, 1155 bp, Homo sapiens
  CDS (251)..(1084)
catcgaaggtcgatgatctaactatctattcgatgatgaagataccccaccaaacccaaaaaaagagatctctcgaggatccgaattcgcggccgcgtcgacgtaagctcggctcacagtcgcaggagagttctggggtacacgggcaaaggggcttgagaaggcccggaggcgaagccgaagagaagcaactgtgccccggagaagagaagctcgcccattccagactgggaaccagctttcagtgaagatggcagggccagaactgttgctcgactccaacatccgcctctgggtggtcctacccatcgttatcatcactttcttcgtaggcatgatccgccactacgtgtccatcctgctgcagagcgacaagaagctcacccaggaacaagtatctgacagtcaagtcctaattcgaagcagagtcctcagggaaaatggaaaatacattcccaaacagtctttcttgacacgaaaatattatttcaacaacccagaggatggatttttcaaaaaaactaaacggaaggtagtgccaccttctcctatgactgatcctactatgttgacagacatgatgaaagggaatgtaacaaatgtcctccctatgattcttattggtggatggatcaacatgacattctcaggctttgtcacaaccaaggtcccatttccactgaccctccgttttaagcctatgttacagcaaggaatcgagctactcacattagatgcatcctgggtgagttctgcatcctggtacttcctcaatgtatttgggcttcggagcatttactctctgattctgggccaagataatgccgctgaccaatcacgaatgatgcaggagcagatgacgggagcagccatggccatgcccgcagacacaaacaaagctttcaagacagagtgggaagctttggagctgacggatcaccagtgggcactagatgatgtcgaagaagagctcatgggccaaagacctccacttcgaaggcatgttcaaaaaggaattacagacctctattttttgaagaccgagcagggattagctgtgtcaggaacttggagttgcacttaaccttgtaactttgtttggagctggcacctcttgaaataaaaaggaggatgcacgagctgggaaaaaaaaaa

SEQ ID NO: 75 - DNA, 749 bp, Homo sapiens
  CDS (285)..(440)
taaaaatgttgaaaataaggcttacttttattatttgaatatggtaattatgtaattatccttttaatatgttaaggttatattctgtgccttagagtatgctaagcactttatacataattatcttatttaagcctcgtagaaatcttatgagcaaaatgttactcggtacacttaaagtacaggtaactgaggcttaaagatgtaaaataatttgtccaccacagtgcttttaaaagatgctcgtaaccactatattgtaatttcaaaccctgattccattaatgctttttgttgtgttgcctttactgataattgtgttcaatattcccatgagggaggcagtctttgactttttatttatgataaagattattaaagtgcttaaagttttttattgtatagcgtgttttatcatcaagcaggttttagttttttaaggtaaactgatcaaaaataataaaaggtgatgggtttatgacacttgggtttgagagaactttaattggagcaatatttcaagaaaatccttcttactgtttttcgaaactggtgaggggcagagatgccccaagaacacttctaggtttattggttcgaaagaaaggactaccgggagtggttttaggcgcccctcgggcaagaattaataagggcaagaattcccggaagatttctaagggtttgggccggggaccggctgggggaacgagaccccccccggcccttgtggttgcaacctgccccct

SEQ ID NO: 76 - DNA, 778 bp, Homo sapiens
  CDS (272)..(466)
gcggtggaattcgcacacacacacgtagtacaaagaaatactatcagtgaatggaggcaagtcattgagttctgtaatcttgatagtccagagaaagggatgaatctgccagatcagaggagctcctgatgtcttcttcatcaggttaaggatattttcttttatatctaatttaattcatctaagaacgactcattaaattacgtataattctttactacataaatgaagttccctcttattcctattttactttttttttaaattaggaatggttacttattttatcaaatgctttcattatgaggtttcttttcttctttggtttgctgttgtcaggaatgatgtagacaggccagtctccctgtcactcttctcttcctatagtttattctcaacatatccagacacatgtcccttgttcaaactccccacccacttactgtgttgtttagaggaaatataaatgtccttattataactgacaaggccctaccctgttcaatcttactacttttctgcctaatctacttctctctctctatctaactcatcctactcagtcatcttggctttcttgatgttcctggaatatactggacatgttccctttacagagccttttcagttgctcgtctccttaccttggatgtatttccatcccacatcaccacacttagttagatccctcacagacttcagatctttactcaaaggtcaccttttttaggagaccttccttggtcacccttttctaaaggtcatcccatcttgcctt

SEQ ID NO: 77 - DNA, 476 bp, Homo sapiens
  CDS (280)..(420)
ttgaaaccctgataacgtttgacctgcactacgccaagcttggcacgaggggaacattttctgagcttctttctagctcttacatgctgggggtctgtgaattctttgccttctcaaagatttcagaaaattaactctcattgagtggcattttctgactccgggaataaaggattttttttctaagattgttttcttaaaattagaagactgatgttgtattattaaaaacaaccaactcaccatgcttcagggtagagattcttttgtctattgctaatggaggatgttagagagaaggtcatggctgtacctattatgctgttctatttcagcctactctataattctctgctttttttgaatcctattcttttgctgagtaccacccacctacttctgggagacaaggctgtgtgaaagacatcctcagacgtctcatctgctttctcatccatctgcacctggatgctggg

SEQ ID NO: 78 - DNA, 835 bp, Homo sapiens
  CDS (370)..(672)
ggaattcttttgggaataggtaattatagtcacatggtttaaaattcaaaagttacaaggggatataaatgtctccctcccaccttgtccccagaggtggctgtttcgatcagagccttgtttctagacgtgtgtgtgtgtatgtgtacgcatgtgtgtgtatgcacaagtagttttgggttctcttttcttggtggtgtacagaagggtagtcaaagcccgactcatgatccctaactcgagtcttttaatgggattgtgtcctaactgcaaaacccgcctcaccaactttgttataaactccccgggtttatagggacagtcatctactgtcccttcctaacagcatggtgcagaaacactccataaatgagtcttgtgttgaatcagattgaattaagtgagaaaggaatggcggtgaaaaatgtggctttagtcatcacatgggcctacgggtttgtgaaagtaacattgagtctccttgtgttctgtgtgtactgcatgtatgtcatcttgcatctaaggatgtatattacccataaaggagcatgcagacacatgagtgcatcttggcttgccactaactgcctgtggccttggggctgtcactcaacttttcatctggaaattgagaataataatactattatccttctggaattgtgtgcataaatgcacagggcctggctcataaaaagtactcagtgagggccaggcgcggtggcgcacgcctgtaatcccagcactttgggaggccgaggggtgcagattacgaggtcaagagatcgagaccatcctggctaacacggtgaaaccctgtctctactaaaaatac

SEQ ID NO: 79 - DNA, 1193 bp, Homo sapiens
  CDS (282)..(1193)
atcctccctctgtggtggtcaccagccaccaggccccaggagaaaagaagaaactgaagtgcctggcctacgacttctacccagggaaaattgatgtgcactggactcgggccggcgaggtgcaggagcctgagttacggggagatgttcttcacggtggaaacggcacttacctgacctggttgttggtgcatgtgcccccgcaggacacagccccctactcctgccacgtgcagcacagcagcctggcccagcccctcgtggtgcccggggaggccaggatgtgtggcaggttcctgcggcggctgctggcggaggagagccggcgctccacccccgtggggcgcctcttgcttcccgtgctcctgggattccgccttgtgctgctggctgccagtgggcctggagtctatggtgatgagcagagtgaattcgtgtgtcacacccagcagccgggctgcaaggctgcctgcttcgatgccttccaccccctctccccgctgcgtttctgggtcttccaggtcatcttggtggctgtacccagcgccctctatatgggtttcactctgtatcacgtgatctggcactgggaattatcaggaaaggggaaggaggaggagaccctgatccagggacgggagggcaacacagatgtcccaggggctggaagcctcaggctgctctgggcttatgtggctcagctgggggctcggcttgtcctggagggggcagccctggggttgcagtaccacctgtatgggttccagatgcccagctcctttgcatgtcgccgagaaccttgccttggtagtataacctgcaatctgtcccgcccctctgagaagaccattttcctaaagaccatgtttggagtcagcggtttctgtctcttgtttacttttttggagcttgtgcttctgggtttggggagatggtggaggacctggaagcacaaatcttcctcttctaaatacttcctaacttcagagagcaccagaagacacaagaaagcaaccgatagcctcccagtggtggaaaccaaagagcaatttcaagaagcagatgggaaattgcctgtccccaacaaatcaggctgtttgcagatgagtcttcctttgcaacttcgtaacttcttcctagcctctgattggttgctttctgcaaagcatgaactggccaaagggaaacttcta

SEQ ID NO: 80 - DNA, 1726 bp, Homo sapiens
  CDS (247)..(1413)
attcgaaatggatgatgtatataactatctattcgatgatgaagataccccaccaaacccaaaaaaagagatctctcgaggatccgaattcgcggccgcgtcgacgccaggtgttggaggcctttgctacgcggtccgaggctttcattgcacaccgcggctaatgccgccgccacggctacagaaacgacctgccaagacgtcgcggcgacccccgtcgcgcggtacccgccgattgtggcctccatgacagccgacagcaaagctgcacggctgcggcggatcgagcgctggcaggcgacggtgcacgctgcggagtcggtagacgagaagctgcgaatcctcaccaagatgcagtttatgaagtacatggtttacccgcagaccttcgcgctgaatgccgaccgctggtaccagtacttcaccaagaccgtgttcctgtcgggtctgccgccgcccccagcggagcccgagcccgagcccgaacccgaacctgaacctgcgctggacctcgcggcgctgcgtgcggtcgcctgcgactgcctgctgcaggagcacttctacctgcggcgcaggcggcgcgtgcaccgttacgaggagagcgaggtcatatctttgcccttcctggatcagctggtgtcaaccctcgtgggcctcctcagcccacacaacccggccctggccgctgccgccctcgattatagatgcccagttcatttttactgggtgcgtggtgaagaaattattcctcgtggtcatcgaagaggtcgaattgatgacttgcgataccagatagatgataaaccaaacaaccagattcgaatatccaagcaactcgcagagtttgtgccattggattattctgttcctatagaaatccccactataaaatgtaaaccagacaaacttccattattcaaacggcagtatgaaaaccacatatttgttggctcaaaaactgcagatccttgctgttacggtcacacccagtttcatctgttacctgacaaattaagaagggaaaggcttttgagacaaaactgtgctgatcagatagaagttgtttttagagctaatgctattgcaagcctttttgcttggactggagcacaagctatgtatcaaggattctggagtgaagcagatgttactcgaccttttgtctcccaggctgtgatcacagatggaaaatacttttcctttttctgctaccagctaaatactttggcactgactacacaagctgatcaaaataaccctcgtaaaaatatatgttggggtacacaaagtaagcctctttatgaaacaattgaggataatgatgtgaaaggttttaatgatgatgttctacttcagatagttcactttctactgaatagaccaaaagaagaaaaatcacagctgttggaaaactgaaaaagcatatttgattgagaactgtgggaatatttaaattttactgaaggaacaataatgatgagatttgtaactgtcaactattaaatacattgatttttgagacaaatatttcttatgtcaacctgttattagatctcttactctgctcaaattcatcactgaaagatttaattttagttaccttttgttgatttaaaaataattgcatttgtatattgctaactgataagacaaattgagttattgagctattaaatgcacattttaatataaatgcagaaatcccaaataaaatgctaacatactg

SEQ ID NO: 81 - DNA, 1111 bp, Homo sapiens
  CDS (879)..(1052)
agttacgcggtggtacagagtatagtggcggccgcataggaacagtgaaactagagtaggtacttaggacactatattgagctgagaggactggccacgtacagtaaaagagcgacgtttgtgtcacggagcgaatagtcgattgaaactgatgcgttgagtaggtcggccaaggaagtagagactaaagttagggtgggggagatgaagtgcatcaatgataatagcttttggtatttaaaggcccggttaagaaaagtaaaatccaaacgctgggctgggagaaaaatctgtgtaatcccatatatataaatggatgggtatttgaaatatataatacactctcaaagttttcaataataagaaaacaggcacgcaataaccaggaagatatatggatggcaaataagcccatgaaaatattcttaacattattaattataagtgacatgcaatttaaaactgatgagatattatccctgatctataaaaagagcaaaaatttaaatatgtgaccataccaactattaatgaggatgtagagtaactgaacttcttcatgcattggtgttgagaatgtgaaaaaaaacaacaactttggaaaataatgtggcagttttctaaaaagttaaatataaacctaccataagatccaattattctactccttggtgttagtaccaaataaaatgaaagtatgtgcctacatacagactcatacacaaatgtgttcagaagttttacttgtgatagcaaaaattaaaaacaagtcgacttttcatcaacagataaatatgaaaacacattatgatatatgcatacaataaattccactctacaataaaaaaataatacatttggtacattccactacacgaatgagtctcaaaagaattattctgagaaaagatttaagatttaaaaaaagtatcacactgcatgaacaatttcatgtatttaaattctacaaaaagacacaaaccagtagcgtgattgttgaggggaggagaagagggaggtattacaaagggacatgtgaaaactttttggagtgatgcatatatatataatgtatttattatggtgattatgatgggacgcggttccgaac

SEQ ID NO: 82 - DNA, 659 bp, Homo sapiens
  CDS (120)..(350)
  misc_feature (1)...(659): n = a,t,c or g
ccggtccggaattcccgggtcgacccacgcgtccgattttaaagtgtttctttttagtaaaagattgatcctcaaactgggttttacaaatgtagcaggtaagaggtagtgactgtcaaatgttcaaagttgtgttttgttttggtttggtttggttttgctttcaaagggcacacaaaccaatccgatttgaaaaacacaactttacaataaatgaaggaaacctgttctctatgaatatcccaattgtaacgattaggtctcaccacaggacaagttgctaccacaaattaatcacatgtgaacagcaaactgtctttacgaacataaagaggcattctaagttgtagcagacgcctgctctacgagacattaatggagtaaaatcctggagtattacagataaacagttaaagtgatgaacaagggctttatggtttgtataaacagaaatataaacaattttgtatttttctcaattatatgtaattaaataacgtttcagggtaacaaagtattgggtccctttttttaccagcttattctaaagaggctttgaataaaggaaattttgtttcttgcctccaagaaagagccccccccccccccctccaaattttgatagaaaaaaaatttgnccagagcctcgaccccccccc

SEQ ID NO: 83 - DNA, 653 bp, Homo sapiens
  CDS (147)..(308)
ccggtccggaattcccgggtcgacccacgcgtccgatttcctaaaactttattcctctaaacatcttctcaattccccagatcttgttttagttgtagaggcccaaagtagagctctctaaacaaaggcttcctcagtgctgtaaaatgaatttgtatctctttgctgttctcttcttttatgtatttctacatataaaaatcatctttatttgttttgctactaaatggcataatttattttcgaaattcagttatttttgtattttgcatgttaaggctctaagccttaacttagggtctgggtaaatatgaactccaagactcctcgaaaatagtgtagaaataatagcaaaattaaagatgtttgtattccctgtgaatttattttttctttcattcaacacagaatgtgtatctagtacgtgctaggcattataaatttagcagtgaacaaagatgataaaatctcagctctcctggagccaacgttctagtgaaaaatttctctttcttctactttttctgttgacattcatatgggctaacaatgtaccccgagggctggggattataaaggagaagaaaggtgggggacccggctcagctggtaaaatgggaatggaatgacccccttaacccagaaaccttctt

SEQ ID NO: 84 - DNA, 915 bp, Homo sapiens
  CDS (166)..(357)
tttgattgcctgtacgcccgcggtaccggtccggaattcccgggtcgacccacgcgtccgcccacgcgtccgctgagctgaaaagttggatgtgccaaagtgtaaaaacactgatagtgttccttgctgcagataactgcagtaaaccatgtctttagcttcattatgaagattgcttctttcttgctgcagaataacggtatgtattctctctcactgcagctcccagtgctctgtgtcttaaaatcatttaaagcctatagcttgctttggggagttagtacaggggttaaggaaggctttgccggaagaacaattgtaaatcatgagagttactacttgcgcattgtgtggtagtctctttaatgcataatggtcctttttaataccaaaaattaattaataaaggaaatgattacattgtccaaataactgttaaacatgacagatctgttttatgatactgtgtttgacagttaaacattaagtaaacatttaattgactttaagcttgaaatgttcagaatgctctaacccttgctacagaatcttttctgcagcaagttaagtattttgtgtgttttttcccacctgtagcttatcaggcccggtccaaagccttctagcagaggggattgatcctgtcaggggttgctgccaagacatcggaaggatttttgaccaaggttttcaaaagctcagtgtcacatctgccatttgataaaagaaagattttggatgcagaacctggcatttattggcctttgcggcgctgggatggtcggtttgccctccggcactctacaaaatgagcccggctcacacttaattttaaatgggggggcgggctctatatttacccgaccatgtcacgtcgcaaaaacaaagtcggctcacagggacttctcaaccccc

SEQ ID NO: 85 - DNA, 707 bp, Homo sapiens
  CDS (157)..(345)
ccgaaattcccgggtcgacccacgcgtccgctcatattggtgtaaaaattttatatcactgtaggctaaacttacctctgcacactcctccatgtccactgagcatctgctgaagtctgctttttcttcattttttatggaatgtaaagctcatccatgtgtacattattcatgcatttacttttctgccacctccaaagcattcaattaaagcaggaattaaggctcaactatcttactttaacacagttttggcagagatgttacagtgagatgatttttttctgtctgtcaaaggtgtttcttcatgttttccaagatggtctagaacatcatttagagtaaattttcattttggaggaaatttttatgaaaagtctctgtaggtatctcctgtgaatagaggttttaaaaagaaaaagaaggggaaaaaagcccaaagggaaaaaataagtttcttactctgactttcacacatactgtgttctatttgctcccttcatatgtcccagagctaactcctcttcactgagaacgagggcttaatttgaatggttttaatgccttttaaccttttaaaatttttatggacaatttaactggcatttttactcccacccaccagtataaaacttcatgttggtaagaaacccaacaaaaatctttggaaccctgcaaaaatgttttacgttacaatttgacccctc

SEQ ID NO: 86 - DNA, 1828 bp, Homo sapiens
  CDS (633)..(1553)
gaaaaaaaatctgaacccctctcagttctacttgcggaaccgcccggaattcccgggtcgacccacgcgtccggtacccactgccggcctccgcgctttctggccgcagtgtgcgagtcacatggaagctcctgaggagcccgcgccagtgcgcggaggcccggaggccacccttgaggtccgtgggtcgcgctgcttgcggctgtccgccttccgagaagagctgcgggcgctcttggtcctggctggccccgcgttcttggttcagctgatggtgttcctgatcagcttcataagctccgtgttctgtggccacctgggcaagctggagctggatgcagtcacgctggcaatcgcggttatcaatgtcactggtgtctcagtgggattcggcttatcttctgcctgtgacaccctcatctcccagacgtacgggagccagaacctgaagcacgtgggcgtgatcctgcagcggagtgcgctcgtcctgctcctctgctgcttcccctgctgggcgctttttctaacactttcacatcctgctgctcttcaggcaggacccagatgtgtccaggcttacccagacctatgtcacgatcttcattccagctcttcctgcaacctttctttatatgttacaagttaaatatttgctcaaccagggaattgtactgccccagatcgtaactggagttgcagccaaccttgtcaatgccctcgccaactatctgtttctccatcaactgcatcttggggtgataggctctgcactggcaaacttgatttcccagtacaccctggctctactcctctttctctacatcctcgggaaaaaactgcatcaagctacatggggaggctggtccctcgagtgcctgcaggactgtgcctccttcctccgcctggccatccccagcatgctcatgctgtgcatggagtggtgggcctatgaggtcgggagcttcctcagtggcatcctcggcatggtggagctgggcgctcagtccatcgtgtatgaactggccatcattgtgtacatggtccctgcaggcttcagtgtggctgccagtgtccgggtaggaaacgctctgggtgctggagacatggagcaggcacggaagtcctctaccgtttccctgctgattacagtgctctttgctgtagccttcagtgtcctactgttaagctgtaaggatcacgtggggtacatttttactaccgaccgagacatcattaatctggtggctcaggtggttccaatttatgctgtttcccacctctttgaagctcttgcttgcacgagtggtggtgttctgagggggagtggaaatcagaaggttggagccattgtgaataccattgggtactatgtggctggcctccccatcgggatcgcgctgatgtttgcaaccacacttggagtgatgggtctgtggtcagggatcatcatctgtacagtctttcaagctgtgtgttttctaggctttattattcagctaaattggaaaaaagcctgtcagcagggtgccctgaaaaccttgaaggaattttaacgaacgatgttggaaagacaggcgagcctcagtcagatcagcagatgcgccaagaagaacctttgccggaacatccacaggacggcgctaaattgtccaggaaacagctggtgctgcggcgagggcttctgctcctgggggtcttcttaatcttgctggtggggattttagtgagattctatgtcagaattcagtgacgtggtaggaaagaaagtcaggtcaagtgatgcttttgagcttacacacaattcgcaggccgaattacgccactcttt

SEQ ID NO: 87 - DNA, 1042 bp, Homo sapiens
  CDS (181)..(501)
  misc_feature (1)...(1042): n = a,t,c or g
cgacccacgcgtccgcacacatgaggttcgtgacacacacacgaggcagtcggggagcagaatcaccaaatgccaaggtcacacaccaggttcccacgactgtctactactcagttatttttaacagctgttaaatatctcagactcaccccagcctgaagctaggtttctgacaataacatgcatttaactctaagtttacttctgttctccctacacttccccacgtatattattcgagttaatttttgtcttgtttccaatttatttcaaaggatgcgaagtacaaaactgcttcggctcattgacttagatttttcatttactttctctctcttggatctaccaccagtaaatgaatatgacatgtatatcagaaactttggaaaaaaaaaaaaaagggggggccgttttaaaggatccaggtttacgaacgcgggctggcaacgtaaaagtttttttatggggccccctaaatccattccaggggccggggtttaacaacggggggacgggaaaaaaannnnncnntnccccccccccccacccanaaancccacncttttttaagccccgcacttttccactccccccactttttaaaacctaatttaaaaaaactcntattccctcatatccacttataaacacaaataaaatctttatncacccacccctaatatactctttacccaaaacccccccttttttttatcacccaaacttatctcccccctttatcctctcaccnctcccactncaaaaatcattacatttnccccnacnaccaaaatccacctctcccctccccaatnnncccactacactncacccctccaccttccattcttaacacaccnttcctcccctctcaaaccccccccactctcatctcaactaatcctaccttctccccacttacacataatccactttccttactaaattccccccaattctttacacactacctcccttcaccaaaatcatctcttcccccttcacacttttacctcccacacctttctaaaaaaccaacccc

SEQ ID NO: 88 - DNA, 3551 bp, Homo sapiens
  CDS (140)..(1363)
gtccggacattcccgggtcgacgatttcgtccggctgccgcgcatcgtccgcagacgccgccaccgccatgggctcctgaggctagcttgtcactttctgcaaaggtttccctcagggagcctcctgctgccaggcaccatgacagtgaggggggatgtgctggccccggatccagcgtcgcccacgaccgcagcagcctcgcccagcgtctccgtgatccccgagggcagccccactgccatggagcagcctgtgttcctgatgacaactgccgctcaggccatctctggcttcttcgtgtggacggccctgctcatcacatgccaccagatctacatgcacctgcgctgctacagctgccccaacgagcagcgctacatcgtgcgcatcctcttcatcgtgcccatctacgcctttgactcctggctcagcctcctcttcttcaccaacgaccagtactacgtgtacttcggcaccgtccgcgactgctatgaggccttggtcatctataatttcctgagcctgtgctatgagtacctaggaggagaaagttccatcatgtcggagatcagaggaaaacccattgagtccagctgtatgtatggcacctgctgcctctggggaaagacttattccatcggatttctgaggttctgcaaacaggccaccctgcagttctgtgtggtgaagccactcatggcggtcagcactgtggtcctccaggccttcggcaagtaccgggatggggactttgacgtcaccagtggctacctctacgtgaccatcatctacaacatctccgtcagcctggccctctacgccctcttcctcttctacttcgccacccgggagctgctcagcccctacagccccgtcctcaagttcttcatggtcaagtccgtcatctttctttccttctggcaaggcatgctcctggccatcctggagaagtgtggggccatccccaaaatccactcggcccgcgtgtcggtgggcgagggcaccgtggctgccggctaccaggacttcatcatctgtgtggagatgttctttgcagccctggccctgcggcacgccttcacctacaaggtctatgctgacaagaggctggacgcacaaggccgctgtgcccccatgaagagcatctccagcagcctcaaggagaccatgaacccgcacgacatcgtgcaggacgccatccacaacttctcacctgcctaccagcagtacacgcagcagtccaccctggagcctgggcccacctggcgtggtggcgcccacggcctctcccgctcccacagcctcagtggcgcccgcgacaacgagaagactctcctgctcagctctgatgatgaattctaggtgcgggctgcagtggcggaagtgctggcgccatagccacggtcaggctgtgccccacctccagcctcaccaccaggccaggaggcagctggcacagtgctcacgccgcctttatttattggaccagaaacactcacatgtcacttccagaggaacgggggacagccaggctcgcccatgggccttcaggaatatttatacatggcccagcctgcactgcccgggcgagggcagaggacactgggagcaaggcttatgcccctgctgcccgtcctgtgctgggggcatgctgggaccagccgcacccaggccccaatgcttgtgtgtggaccagcggctgcagccttctagcccctcctccccgcgagactctcaggctgaggtcggcaagccgtggctcccccacacaccgtgcaataccctgtctgacctgggctcttcccgcctgcatccctcccctgtccacctttgtccagtgctagattcacctcaccccgggcaggagtggggatgtgggcgctctgtggtcctcccctcctgacccaggcctctgtggcatgctgcaaggatcagagccagacaccaggagtcacaggccccacccaggaagggcattcagggcccctgggcaccgcttctgttgaagcaggggcttctgggcccctgggtatccccacctgtcgtggccacacctctgcctgcctcatgccccttccccctggcctaccaaggacagcccacagcccgcactgccggctcacttgggtccttcctcgatagctttgggcagagcccttgcttcctggctgcttcagggctcaggggctcccagccctccttcccaggctgatgctgggtcctctctctctttggggcttctccctcccgtttcaggggaaaggtctgagtctccacgtttcagaccagcttctgggggaaggcagtccggcagggagaccgggaggggtggccacacagtggggagctgggaggtggggggaatggtcccagactcctctcggggcccctatccacacagggcctggtgttctaccccatctggcccctggcccatctcttctgtgccttagtcacatatgaaagcgcccctccctggctccccatctgtcccacacgctccctggggctcttagttcagctgctggcactcgcaggatcctgcagtgctgggcccagagcccttggacaggcctcaggagtggtcaggaccaccaagcccctcctctccccctccacacctctagacctggggcctccggaacccccagcaggctgggcttatactagctcctgacttaggaagagcctcgtgtcacaacacgtgtccctacaggcaaagtgtcctggcatttaaaacccagattatccctgggtttgggctgcagtcacctggagaagctggtagggtaagggagagggaccctgccggtgttcactggggattctttcttttggtccttcctggaatgaacaggttccctccctgccacctgtgaggagagttggggcccagccgtcttcctggcctccttcctttcctcgtggcagaggcctgcatgtgggtgccagaggccagctctccccctccatcttgggggggcggagcagttgggcccaagctgcccgggagggtgggtgcagacacaggctgaggaccagccctggccctgccccgccatctgctttcaccaagctgtctctccaccgtggcttcccttctccctccaggccaaagtgctgctgattcccactcccttggttttcgcctgcccagcgttgctgtttgcgtggagggtggggggagctcagtggcagggaatcagcggtccgtggggtcgtggggacgggaacatgtgcccgaccgctccatcccctcctcctccttaggatgcataacctaccttgtctttttttttttaaattttctttccaggtagagtagctctttgtacataaagaatacttgaaaaattaattgtatgatgtatgagaagacagagtctcctagttttgtatcttgttgtatgactgccatgagttccaccagaaagccactctattttggtctctgtgacattttaaatgcgtgacagaagtgagcaaataaagtgaggaagaaatctatatatgagataatatagattgtattgaaatctcaaaaaaaaaa

SEQ ID NO: 89 - DNA, 656 bp, Homo sapiens
  CDS (116)..(307)
accggtccggaattcccgggtcgacccacgcgtccgacacattccacccttgagattgctgtaacagtgatctcaacctctgataaggtaagtttataaacttaatgaggaaaaaatggggaaaaaggtcactcttctgctgcagaagtgcgcttggcttctcttggtttgctgcctattcactggcattaagtacctgaacaaatgttttatcacagacagggaactgttgagggatgttcacaatgcattgaacatccttaggcataatttttatgtgaactgggcatccttaaatacattctgactccatgatcagattaccagaaagtgcaggtcccactcactatcttgattcagcatctcccatctggccaaagttgaattttacattgagttggatggtgataaatatgcttagcaaaagtatattcgttgtttctgaagttctctgtgctgataaacactggctgggactagggaagtgggccccaaataaaacaatagcaataatccccaaactggttggggaagggcaggctttatttttgtgcactcttaaggggaaatgtaagttaaactttccacccccccccaaaggtttttgcttgtttggagggccccaacctttgggggcccctcccaatgccttaatt

SEQ ID NO: 90 - DNA, 646 bp, Homo sapiens
  CDS (263)..(553)
ccggtccggaattcccgggtcgacccacgcgtccgcaactatcttatttccttatcatgcacaagttaaatgttagactgaggagtaggtgagttatccccaaggaagtaaaatgatgttaattttcttgaggtcacatgaattgtgagtagctgaatgctactgtgaattctgggcagcccgaccacagagcctgaactcttaaatattatactgtattaacttgacatgtttataaaagtaacaattacatgctacctgaatgccctcagtagttttgaacatggtgcaactgtttatccctatactaaaattccaattaggctattctgttttgagtctttgtaatcatgttttagaatttttgtttccttcctcattgtcaggcatcttttcttcctcccttcccctccttcttcccttccctctttctcttccctctcttcccccttctctttttccttctcttagagtcttgctctgccacccacactggagtgtagcctcaaactcctgggctgtagccatcctcctacctcagcctcctgagtagctgggactgcaagtgtataccactatgcctggctaatttaaaaaaatttaaaatttttttttttttggaaaaacaaaagcctcctttgttgcc

SEQ ID NO: 91 - DNA, 1126 bp, Homo sapiens
  CDS (126)..(434)
  misc_feature (1)...(1126): n = a,t,c or g
acatccaacatttgaatgtattttgactaggtaatttttttctcctttgttaataaaaatagatttaattttttaaatgtcatttttcttgcatctcatcaaatatactttcatacactataaaaatgatgttgggtcatatgtatcacatgtctgtaattcagaaatgcaaacctttggacactgactcaacatctggagatattttttctggttcttatggctggtgttctcctacagctctctacgagcagtcttgtgaagcccacaagcaccgagggaacccatccgggctttactatattgatgcagatggaagtggccccctgggaccatttcttgtgtactgcaatatgacaggtatgttgataatcgttagatgcatagatcagaatagaccaaggagaaatttacctagttggcagcattattaaaacatgcagtttgatagtgtgtacttgctaagtagaagcattaaatatgtatttattaattttgttgtcaacaaaattttcttgtatttcttctttgcctgggttggattataggcaagattcaatgctctgccaaggcatctctctagctcctacactcctcataatacatctgttcatgtgcatcatgataaaatacaaacctctgattcggtgatttacatgctttctgtatttagaaaaaacagaggtgtttaaaaatgctaagaaataacatagatatgttaatgttctatgtgcatcttaaataatttagtgatttttatgtcatataattttttcataaccaaagaaacttgattatttctcgtgctttagatattagaaatgaacactgcttgggctgcgcatggtggctcgcgcctgtaatctcagcactttgggaggccgaggcgggcggatcgcgagatcgagagatcgagaccatcctggccaatgtggtgaaaccccgtctctactgaaaatgcaaaaattagctgggcatggtggcgcccgcacctgtagtcccagctacttgggaggctgaggcgggaggatcccttgaaccanggaggncgaggttgcagtgagccaggattgcgccattgcactccagcctggtgacagagcaagactgcatctcaaaaaaaaaa

SEQ ID NO: 92 - DNA, 904 bp, Homo sapiens
  CDS (137)..(322)
  misc_feature (1)...(904): n = a,t,c or g
cgctccggaattcccgggtcgacccacgcgtccgcaggggtaagccaccgcacccagccccgtaaatatttcttgaggatctactgcgtgccaggccttgtgctgggttccaggagctgattcagagagtgcagagatgaaaaaaggagtggggtgtacgtgtgtatccgtgtgtccatgcatgtgtgtgcatccgtatgtgtgcacatgtgcatgcatgcatgtgtgtgtgtgtctgtgtgcttggtgcctctctcagcctggtggcctgggaggcttctcagaagaggtcacatctctgccaagaccaagggcactgtaaggcagccagatgagagggaggggaagagagatgggagggaggctgggctgagggtacacagtgtggctgctgcctggtgccctgtgagggagcagggtcccttctagctgggagcaatggcgcatgcctgtaatcctagcactttgggaggctgaggcaggagtatcgcttgagctcaggagttcgagaccagcctggacaacatgacgaaaccccatctctacnnnnnananaannnnnanaaaagaaaagaaaaaaaaaaaaagaaaaaannaaaagggggcccctttttaaaaaacacaattttttcccggggggtgagaaaaattatttttttttttttggggccctaaaatttttttctgggggccgctttttttacacggggggggagggggaaagnnncgngngggccttcgttgccgcgggccgngtggcgccgggccgggtcttgttcgttgggggggcctgcttctttttcttttcgctgtggctccggcggttgtgggcgggncgcgttggcccgggagttggggtggccacgactggtaaattggtcgggaggagacctctatggggctg

SEQ ID NO: 93 - DNA, 897 bp, Homo sapiens
  CDS (188)..(544)
ccccccggaattcccgggtcgacccacgcgtccgcggacgcgtgggctttaaaaatacaaaaataatagccttgtcttcttaacctgcaaaagtaattttcctgcataatttaatgttttcatgtggaacaaatgagaatgctttagaaagcacattgtacactgtaaacttctatacaacgtggtgatgttatttttaaagaaaatacaattcttaaagtgtaacaaggtgtttagatccctggatttttgcgtagccctacctttattgttctcatcttctgctgttttacagataactcctgtagatacattttctgatccccacttagttctaaccttagttaagctgcttatgaacattttaaatattgcagttattagtctgactttccctggagaatatgaagtttctttagcctttgaaaatattctcatgtatactcatgcattcataatctgtttctgtaacagacagtggctttttaaaagtaatagtgaaagtaatcttagtagcaatgttaatttatttgactcttgctagttttcaggtacgcaaaaggaggagatgatttcctttaaaaactcagctttgaatagttcgtgttatctggtatatctgaaatattcagaaatgttaaaacagtttttgtttgcctttgctgttaagtttgaaacctcttagtgctttcaattgataatcctggaaaccaacctcagtattgtagtattacatagattattggagttttatagtcttgaaaataaagggctaatagccatagatatatcgctgacactaaaatagccaattgtggttaaaggaacattcagggaatttcaaaaaacttggaaacggaaggaactggggttgacagttttggaggggagattccc

SEQ ID NO: 94 - DNA, 931 bp, Homo sapiens
  CDS (124)..(456)
  misc_feature (1)...(931): n = a,t,c or g
attgatggcgctcgcctgcaggcaccggtccggaattcccgggtcgacccacgcgtccgcctcactctgaccctgatatcttttctgctgttaatctgttctctgagaaaacatctcaagaagatgcagctccatggcaaaggatctcaagatcccagcaccaagggccacataaaagctttgcaaactgtgacctcctttcttctgttatgtgccatttactttctgtccatgatcatatcagtttgtaattttgggaggctggaaaagcaacctgtcttcatgttctgccaagctattatattcagctatccttcaacccacccattcatcctgattttgggaaacaagaagctaaagcagatttttctttcagttttgcggcatgtgaggtactgggtgaaagacagaagccttcgtctccatagattcacaagaggggcattgtgtgtcttctagcagaaaacaaactggtggtgtatgaaacattttatatttcttactgggttttctgtaatatatgtatatgaataatttccacatgtatacctagaaaagtcttttacctaaagttagtctacaaaagtacatatatatagatggctgtggtgtgaccgtgtgtgcacatatgtgaatgtgtatatatcacgcaacaggagtgtcattcatgctgctggcccctggtgaagtgacaagtacaattaaaggtggctctgatccttttaaacacctaccaaaccctaaatttgattccaaaaggaccattctgcaaagagtttgcaaagatctgggcccacttgtgagcaccaacctttaaacatgatgcgccagtctcccaggaggccctactcattcccctacataactatttgatggccccacccctaccanccccgcttccccccacctgaaaaaagcaggccacagaagc

SEQ ID NO: 95 - DNA, 1278 bp, Homo sapiens
  CDS (50)..(1003)
atttggccctcgaggccaagaattcggcacgagggcgggcacgcgggccatggctccctgggcggaggccgagcactcggcgctgaacccgctgcgcgcggtgtggctcacgctgaccgccgccttcctgctgaccctactgctgcagctcctgccgcccggcctgctcccgggctgcgcgatcttccaggacctgatccgctatgggaaaaccaagtgtggggagccgtcgcgccccgccgcctgccgagcctttgatgtccccaagagatatttttcccacttttatatcatctcagtgctgtggaatggcttcctgctttggtgccttactcaatctctgttcctgggagcaccttttccaagctggcttcatggtttgctcagaattctcggggcggcacagttccagggaggggagctggcactgtctgcattcttagtgctagtatttctgtggctgcacagcttacgaagactcttcgagtgcctctacgtcagtgtcttctccaatgtcatgattcacgtcgtgcagtactgttttggacttgtctattatgtccttgttggcctaactgtgctgagccaagtgccaatggatggcaggaatgcctacataacagggaaaaatctattgatgcaagcacggtggttccatattcttgggatgatgatgttcatctggtcatctgcccatcagtataagtgccatgttattctcggcaatctcaggaaaaataaagcaggagtggtcattcactgtaaccacaggatcccatttggagactggtttgaatatgtttcttcccctaactacttagcagagctgatgatctacgtttccatggccgtcacctttgggttccacaacttaacttggtggctagtggtgacaaatgtcttctttaatcaggccctgtctgcctttctcagccaccaattctacaaaagcaaatttgtctcttacccgaagcataggaaagctttcctaccatttttgttttaagttaacctcagtcatgaagaatgcaaaccaggtgatggtttcaatgcctaaggacagtgaagtctggagtccaaagtacagtttcagcaaagctgtttgaaactctccattccatttctataccccacaagttttcactgaatgagcatggcagtgccactcaagaaaatgaatctccaaagtatcttcaaagaataaatactaatggcagatctgcctcgtgccgaattcgaatcgatgggatcctgcaaaaagaacaagtagcttgtatt

SEQ ID NO: 96 - DNA, 1721 bp, Homo sapiens
  CDS (162)..(1085)
tggtgttatgttgagtccggttattgaggccgtagtaataaccatctattcgatgatgaagataccccaccaaacccaaaaaaagagatctctcgaggatccgaattcgcggccgcgtcgactttcatttggtggtgaggactgaacggagagaactcaccatggagtttgggctgagctggctttttcttgtggctattttaaaaggtgtccagtgtgaggtgcagctgttggagtctgggggaggcttggtacagcctggggggtccctgagactctcctgtgcagcctctggattcacctttagcagtttttcgatgagctgggtccgccaggctccagggaaggggctggagtgggtctcatctattagtggtagttcgggtaccacatactacgcagactccgtgaagggccggttcaccatctccagagacaattccaagaacacgctgtatctgcaaatgaacagcctgagagccgaggacacggccgtatattactgtgcgaaaccgtttccgtattttgactactggggccagggaaccctggtcaccgtctcgagtggcgatgggtccagtggcggtagcgggggcgcgtcgactggcgaaattgtgttgacgcagtctccaggcaccctgtctttgtctccaggggaaagagccaccctctcctgcagggccagtcagagtgttagcagcagctacttagcctggtaccagcagaaacctggccaggctcccaggctcctcatctatggtgcatccagcagggccactggcatcccagacaggttcagtggcagtgggtctgggacagacttcactctcaccatcagcagactggagcctgaagattttgcagtgtattactgtcagcagacgggtcgtattccgccgacgttcggccaagggaccaaggtggaaatcaaacgaactgtggctgcaccatctgtcttcatcttcccgccatctgatgagcagttgaaatctggaactgcctctgttgtgtgcctgctgaataacttctatcccagagaggccaaagtacagtggaaggtggataacgccctcccaatcgggtaactcccaggagagtgtcacagagcaggacagcaaggacagcacctacagcctcagcagcaccctgacgctgagcaaagcagactacgagaaacacaaagtctacgcctgcgaagtcacccatcagggcctgagctcgcccgtcacaaagagcttcaacaggggagagtgttagagggagaagtgcccccacctgctcctcagttccagcctgaccccctcccatcctttggcctctgaccctttttccacaggggacctacccctattgcggtcctccagctcatctttcacctcacccccctcctcctccttggctttaattatgctaatgttggaggagaatgaataaataaagtgaatctttgcacctgtggtttctctctttcctcatttaataattattatctgttgttttaccaactactcaatttctcttataagggactaaatatgtagtcatcctaaggcgcataaccatttataaaaatcatccttcattctattttaccctatcatcctctgcaagacagtcctccctcaaacccacaagccttctgtcctcacagtcccctgggccatggtaggagagacttgcttccttgttttcccctcctcagcaagccctcatagtccttt

SEQ ID NO: 97 - DNA, 1741 bp, Homo sapiens
  CDS (162)..(641)
tggtgttatgttgagtccggttattgaggccgtagtaataaccatctattcgatgatgaagataccccaccaaacccaaaaaaagagatctctcgaggatccgaattcgcggccgcgtcgactttcatttggtggtgaggactgaacggagagaactcaccatggagtttgggctgagctggctttttcttgtggctattttaaaaggtgtccagtgtgaggtgcagctgttggagtctgggggaggcttggtacagcctggggggtccctgagactctcctgtgcagcctctggattcacctttgacagctatgccatgagctgggtccgccaggctccagggaaggggctggattgggtctcagctgttagtggtggtggtggtagcacatactacgcagactccgtgaagggccggttcaccatctccagagacaacgccaagagcacgatgtatctgcaaatgaacagtctgagagctgaggacacggccatgtattactgtgcaaaagataattacgatttttggagtggtacctttgactactggggccagggaaccctggtcaccgtctcctcagcttccaccaagggcccatcggtcgtagcgggggcgcgtcgactggcgaaattgtgttgacgcagtctccaggcaccctgtctttgtctccaggggaaagagccaccctctcctgcagggccagtcagagtgttagcagcagctacttagcctggtaccagcagaaacctggccaggctcccaggctcctcatctatggtgcatccagcagggccactggcatcccagacaggttcagtggcagtgggtctgggacagacttcactctcaccatcagcagactggagcctgaagattttgcagtgtattactgtcagcagacgggtcgtattccgccgacgttcggccaagggaccaaggtggaaatcaaacgaactgtggctgcaccatctgtcttcatcttcccgccatctgatgagcagttgaaatctggaactgcctctgttgtgtgcctgctgaataacttctatcccagagaggccaaagtacagtggaaggtggataacgccctcccaatcgggtaactcccaggagagtgtcacagagcaggacagcaaggacagcacctacagcctcagcagcaccctgacgctgagcaaagcagactacgagaaacacaaagtctacgcctgcgaagtcacccatcagggcctgagctcgcccgtcacaaagagcttcaacaggggagagtgttagagggagaagtgcccccacctgctcctcagttccagcctgaccccctcccatcctttggcctctgaccctttttccacaggggacctacccctattgcggtcctccagctcatctttcacctcacccccctcctcctccttggctttaattatgctaatgttggaggagaatgaataaataaagtgaatctttgcacctgtggtttctctctttcctcatttaataattattatctgttgttttaccaactactcaatttctcttataagggactaaatatgtagtcatcctaaggcgcataaccatttataaaaatcatccttcattctattttaccctatcatcctctgcaagacagtcctccctcaaacccacaagccttctgtcctcacagtcccctgggccatggtaggagagacttgcttccttgttttcccctcctcagcaagccctcatagtccttt

SEQ ID NO: 98 - DNA, 1736 bp, Homo sapiens
  CDS (162)..(1100)
tggtgttatgttgagtccggttattgaggccgtagtaataaccatctattcgatgatgaagataccccaccaaacccaaaaaaagagatctctcgaggatccgaattcgcggccgcgtcgactttcatttggtggtgaggactgaacggagagaactcaccatggagtttgggctgagctggctttttcttgtggctattttaaaaggtgtccagtgtgaggtgcagctgttggagtctgggggaggcttggtacagcctggggggtccctgagactctcctgtgcagccactggattcacttttagcagctatgccatgagctgggtccgccaggctccagggaaggggctggagtgggtctcagaaattattagtagcggtggtaccacatactacgcagactccgtgaagggccggttcaccatctccagagacaattccaagaacacgctgtatctgcaaatgaacggcatgagagccgaggacacggccatatattactgtgcgaaagacataattagtgattcttggcgctactttgactactggggccagggagccctggtcaccgtctcctcaggggatgggtccagtggcggtagcgggggcgcgtcgactggcgaaattgtgttgacgcagtctccaggcaccctgtctttgtctccaggggaaagagccaccctctcctgcagggccagtcagagtgttagcagcagctacttagcctggtaccagcagaaacctggccaggctcccaggctcctcatctatggtgcatccagcagggccactggcatcccagacaggttcagtggcagtgggtctgggacagacttcactctcaccatcagcagactggagcctgaagattttgcagtgtattactgtcagcagacgggtcgtattccgccgacgttcggccaagggaccaaggtggaaatcaaacgaactgtggctgcaccatctgtcttcatcttcccgccatctgatgagcagttgaaatctggaactgcctctgttgtgtgcctgctgaataacttctatcccagagaggccaaagtacagtggaaggtggataacgccctcccaatcgggtaactcccaggagagtgtcacagagcaggacagcaaggacagcacctacagcctcagcagcaccctgacgctgagcaaagcagactacgagaaacacaaagtctacgcctgcgaagtcacccatcagggcctgagctcgcccgtcacaaagagcttcaacaggggagagtgttagagggagaagtgcccccacctgctcctcagttccagcctgaccccctcccatcctttggcctctgaccctttttccacaggggacctacccctattgcggtcctccagctcatctttcacctcacccccctcctcctccttggctttaattatgctaatgttggaggagaatgaataaataaagtgaatctttgcacctgtggtttctctctttcctcatttaataattattatctgttgttttaccaactactcaatttctcttataagggactaaatatgtagtcatcctaaggcgcataaccatttataaaaatcatccttcattctattttaccctatcatcctctgcaagacagtcctccctcaaacccacaagccttctgtcctcacagtcccctgggccatggtaggagagacttgcttccttgttttcccctcctcagcaagccctcatagtccttt

SEQ ID NO: 99 - DNA, 1710 bp, Homo sapiens
  CDS (162)..(1253)
tggtgttatgttgagtccggttattgaggccgtagtaataaccatctattcgatgatgaagataccccaccaaacccaaaaaaagagatctctcgaggatccgaattcgcggccgcgtcgactttcatttggtggtgaggactgaacggagagaactcaccatggagtttgggctgagctggctttttcttgtggctattttaaaaggtgtccagtgtgaggtgcagctgttggagtctgggggaggcttggtacagcctggggggtccctgagactctcctgtgcagcctctggattcacctttagcagtttttcgatgagctgggtccgccaggctccagggaaggggctggagtgggtctcatctattagtggtagttcgggtaccacatactacgcagactccgtgaagggccggttcaccatctccagagacaattccaagaacacgctgtatctgcaaatgaacagcctgagagccgaggacacggccgtatattactgtgcgaaaccgtttccgtattttgactactggggccagggaaccctggtcaccgtctcgagtggcgatgggtccagtggcggtagcgtcaccgtctcctcaagtgacatccagatgacccagtctccttccaccctgtctgcatctgtaggagacagagtcaccatcacttgccgggccagtcagagtattagtagctggctggcctggtatcagcagaaaccagggaaagcccctaagctcttgatctataaggcatctagtttagaaagtggggtcccatcaaggttcagcggcagtggatctgggacagatttcactctcaccatcagcagcctgcagcctgatgattttgcaacttattactgccagcaatatgtttattacccgctcactttcggcggagggaccaaggtggaaatcaaacgaactgtggctgcaccatctgtcttcatcttcccgccatctgatgagcagttgaaatctggaactgcctctgttgtgtgcctgctgaataacttctatcccagagaggccaaagtacagtggaaggtggataacgccctccaatcgggtaactcccaggagagtgtcacagagcaggacagcaaggacagcacctacagcctcagcagcaccctgacgctgagcaaagcagactacgagaaacacaaactctacgcctgcgaagtcacccatcagggcctgagctcgcccgtcacaaagagcttcaacaggggagagtgttagagggagaaggtgccccacctgtcctcagtccagcctgccccctcccatcctttggcctctgccctttttccacaggggacctcccctattgcggcctccagctcatctttacctcacccccctccccttccttggctttaattatgctaatgttggaggagaatgaataaataaagtgaatctttgcacctgtggtttctctctttcctcatttaataattattatctgttgttttaccaactactcaatttctcttataagggactaaatatgtagtcatcctaaggcgcataaccatttataaaaatcatccttcattctattttaccctatcatcctctgcaagacagtcctccctcaaacccacaagccttctgtcctcacagtcccctgggccatggtaggagagacttgcttccttgttttcccctcctcagcaagccctcatagtccttt

SEQ ID NO: 100 - DNA, 481 bp, Homo sapiens
  CDS (136)..(276)
gcgccccccattgattcgaagctgtacgcctgcaggtaccggtccggaattcccgggtcgacccacgcgtccgctatatccctaaactcaaagggacatccagtgctatcaagacacccaattgaacatacacatatgttccccccttacttttctcttattttacttctattcacttttgcttcgaaattctttctgtctctgaacctgaaaaaaagcaacatagttaaagcaagaattgagagtacaaagacagtgatatcaaagagatgttaatcctccacacagtctggctgcattgaggatatttctctttgtgcagtagaaaactggaaatagctaagtctattggaactcttctttctcaaattctattgaactgaagagtaggaaatttagaaacagtaagacgtgggagataatttaactgaattcactacttttgtgacaaggatatccagaggaactcagggacttgccc

SEQ ID NO: 101 - DNA, 708 bp, Homo sapiens
  CDS (218)..(454)
ccgcgcttcattgaagtcgtcgcctgcaggtaccggagcggaattcccgggtcgacccacgcgtccgcacttcttcatcattccatcagaaccttataatgaatttgatgcagattgcttttgaggggtttatctctcagtcctaaacatataggggcatgttagaaaatttgggattctaggtgtgatgcctgaaaagggactgatataactgagcatggctatgcagtctgtgataagaaaacaattcacagctctagctggcttctgcttctggttctgtctctttaccttagcagtcctgagtctcaccttgcttatctgcaaactgaggataatgccatttaaacttgaaggtttgtttcaagaattaaataaatcatggcatatgaagctcttgtcacaagatagggagttaataaatatgctgttgctcttaatgggcaggtcctaagtgatggcttagaaacctaagattggaaggcatcttggagatgttctggctcaacctcctaacaatgcaaaagtttgtcctagaacactcctggaagatggatctttaggctctcattagataacccagggatcccactgtctcaaaaggcagtctgtgcatatttttggtcaggtctaattcttaatgataataacacacattttatttgtgggttacgaaatgcttttacgtcatttatttaacttgactgt

SEQ ID NO: 102 - DNA, 3969 bp, Homo sapiens
  CDS (52)..(3618)
cgcgccccccgccgccgctgcacaccggacccagccgccgtgccgcgggccatggacctgcccaggggcctggtggtggcctgggcgctcagcctgtggccagggttcacggacaccttcaacatggacaccaggaagccccgggtcatccctggctccaggaccgccttctttggctacacagtgcagcagcacgacatcagtggcaataagtggctggtcgtgggcgccccactggaaaccaatggctaccagaagacgggagacgtgtacaagtgtccagtgatccacgggaactgcaccaaactcaacctgggaagggtcaccctgtccaacgtgtccgagcggaaagacaacatgcgcctcggccttagtctcgccaccaaccccaaggacaacagcttcctggcctgcagccccctctggtctcatgagtgtgggagctcctactacaccacagggatgtgttcaagagtcaactccaacttcaggttctccaagaccgtggccccagctctccaaaggtgccagacctacatggacatcgtcattgtcctggatggctccaacagcatctacccctgggtggaggttcagcacttcctcatcaacatcctgaaaaagttttacattggcccagggcagatccaggttggagttgtgcagtatggcgaagatgtggtgcatgagtttcacctcaacgactacaggtctgtaaaagatgtggtggaagctgccagccacattgagcagagaggaggaacagagacccggacggcatttggcattgaatttgcacgctcagaggctttccagaagggtggaaggaaaggagccaagaaggtgatgattgtcatcacagatggggagtcccacgacagcccagacctggagaaggtgatccagcaaagcgaaagagacaacgtaacaagatatgcggtggccgtcctgggctactacaaccgcagggggatcaatccagaaacttttctaaatgaaatcaaatacatcgccagtgaccctgatgacaagcacttcttcaatgtcactgatgaggctgccttgaaggacattgtcgatgccctgggggacagaatcttcagcctggaaggcaccaacaagaacgagacctcctttgggctggagatgtcacagacgggcttttcctcgcacgtggtggaggatggggttctgctgggagccgtcggtgcctatgactggaatggagctgtgctaaaggagacgagtgccgggaaggtcattcctctccgcgagtcctacctgaaagagttccccgaggagctcaagaaccatggtgcatacctggggtacacagtcacatcggtcgtgtcctccaggcaggggcgagtgtacgtggccggagccccccggttcaaccacacgggcaaggtcatcctgttcaccatgcacaacaaccggagcctcaccatccaccaggctatgcggggccagcagataggctcttactttgggagtgaaatcacctcggtggacatcgacggcgacggcgtgactgatgtcctgctggtgggcgcacccatgtacttcaacgagggccgtgagcgaggcaaggtgtacgtctatgagctgagacagaaccggtttgtttataacggaacgctaaaggattcacacagttaccagaatgcccgatttgggtcctccattgcctcagttcgagacctcaaccaggattcctacaatgacgtggtggtgggagcccccctggaggacaaccacgcaggagccatctacatcttccacggcttccgaggcagcatcctgaagacacctaagcagagaatcacagcctcagagctggctaccggcctccagtattttggctgcagcatccacgggcaattggacctcaatgaggatgggctcatcgacctggcagtgggagcccttggcaacgctgtgattctgtggtcccgcccagtggttcagatcaatgccagcctccactttgagccatccaagatcaacatcttccacagagactgcaagcgcagtggcagggatgccacctgcctggccgccttcctctgcttcacgcccatcttcctggcaccccatttccaaacaacaactgttggcatcagatacaacgccaccatggatgagaggcggtatacaccgagggcccacctggacgagggcggggaccgattcaccaacagagccgtactgctctcctccggccaggagctctgtgagcggatcaacttccatgtcctggacactgctgactacgtgaagccagtgaccttctcagtcgagtattccctggaggaccctgaccatggccccatgctggacgacggctggcccaccactctcagagtctcggtgcccttctggaacggctgcaatgaggatgagcactgtgtccctgaccttgtgttggatgcccggagtgacctgcccacggccatggagtactgccagagggtgctgaggaagcctgcgcaggactgctccgcatacacgctgtccttcgacaccacagtcttcatcatagagagcacacgccagcgagtggcggtggaggccacactggagaacaggggcgagaacgcctacagcacggtcctaaatatctcgcagtcagcaaacctgcagtttgccagcttgatccagaaggaggactcagacggtagcattgagtgtgtgaacgaggagaggaggctccagaagcaagtctgcaacgtcagctatcccttcttccgggccaaggccaaggtggctttccgtcttgattttgagttcagcaaatccatcttcctacaccacctggagatcgagctcgctgcaggcagtgacagtaatgagcgggacagcaccaaggaagacaacgtggcccccttacgcttccacctcaaatacgaggctgacgtcctcttcaccaggagcagcagcctgagccactatgaggtcaagcccaacagctcgctggagagatacgatggtatcgggcctcccttcagctgcatcttcaggatccagaacttgggcttgttccccatccacgggatgatgatgaagatcaccattcccatcgccaccaggagcggcaaccgcctactgaagctgagggacttcctcacggacgaggcgaacacgtcctgtaacatctggggcaatagcactgagtaccggcccaccccagtggaggaagacttgcgtcgtgctccacagctgaatcacagcaactctgatgtcgtctccatcaactgcaatatacggctggtccccaaccaggaaatcaatttccatctactggggaacctgtggttgaggtccctaaaagcactcaagtacaaatccatgaaaatcatggtcaacgcagccttgcagaggcagttccacagccccttcatcttccgtgaggaggatcccagccgccagatcgtgtttgagatctccaagcaagaggactggcaggtccccatctggatcattgtaggcagcaccctggggggcctcctactgctggccctgctggtcctggcactgtggaagctcggcttctttagaagtgccaggcgcaggagggagcctggtctggaccccacccccaaagtgctggagtgaggctccagaggagactttgagttgatgggggccaggacaccagtccaggtagtgttgagacccaggcctgtggccccaccgagctggagcggagaggaagccagctggctttgcacttgacctcatctcccgagcaatggcgcctgctccctccagaatggaactcaagctggttttaagtggaactgccctactgggagactgggacacctttaacacagacccctagggatttaaagggacacccctacacacacccaggcccacgccaaggcctccctcaggctctgtggagggcatttgctgccccagctactaaggtgctatgaattcgtaatcatccccattctc

SEQ ID NO: 103 - DNA, 735 bp, Homo sapiens
  CDS (305)..(463)
gtgatgatacccgtccggaattcccgggtcgacccacgcgtccgctaatttctaattcttctgtagcatttattaagaaaagttaaaataactgcttaatttgagatgaaattaacacatgagaacttcactcattaggtggtatgttctgtgactgttgtttaatgtgtattttatggcagttttgactgccattttgtcatttgagaaaggtgaaatgaagtactattttgggctgcgaaacctgaagttgtagggaaacctgtgtttgaagaccattaagaagttgttttgcatactaagaatggcactgaacatcattatcaatcctgtgtggttttgccactgcttgacttgcacaattcacattgattttcatattttattcattaaaatttttaaacacatgttttttaggtcgctttggtcatcttggcttagccatcaacttgatcacatatgatgatcgcttcaacctgaaaagtattgaggagcagctgggaacagaaattaaacctattccgagcaacattgataagagcctgtatgtggcagaataccacagcgagcctgtagaagatgagaaaccttaacaagcatgtacgtccctgacagaacagctaagaggaacctttaaatgagggaaatcaaaatcttctttcctggtggaaatttgatggcacaccatatataatagcaatataagggcggactcccccctagcataaatgacag

SEQ ID NO: 104 - DNA, 633 bp, Homo sapiens
  CDS (48)..(281)
gaccagcggccacccacgcgtccggtctgaatcttattcctttgtagatggccatttttcctctttggaagctcttgaatgttttggtatgcatattttcctcattcatcatgctgaatatttactgtacccttttgatctggaaatttatttattcagcttttttctgttatattacttctttgatgattttcccctttagttttttctgttctttctttctagaccttcttaaagtcatagtttatatcttcttcctttatctgtactcctcaagataaatgctagaagttggttaagccaggacttaaacccagcttgtagctttataagctgggttttgaacctcagttttctagttagtaaagtgatcatgagaataacgacctcaaaggatatcatgaggattaaattagatttttttaaagtccttagcactatgcccagtacatacagcattcaataatgttaggaattgttgctgtcatgttcactattaatttatttaacaaatatttattgaatgctaatacaaatgtgccatgctcttctaggtgacccccagtaaggtagaggactaagaagacatgagatttatgtgaaaaagcatttttaaagaagaccattggcaat

SEQ ID NO: 105 - DNA, 810 bp, Homo sapiens
  CDS (147)..(293)
gtacactgcggtggaattcccgctttttgaggcctcagttttcctcatctgcaaaaccagtctaatgatgctatagagttgttatagaaagttgaatctttgtcatctattgaatgcttgaaatttagctaaaagtgtctcaggagatgggctaccttctgtggttagtactgtctatcttggtgtgtacagaattgggacttggcaggttgaccttccctctggattcagaaagccccaggacttcttataaagttaggccatgggtcgtcttggaggcttgggtctggtaaataattgagcctgagctcacaatcctgcccctgggtccaggtggctggtctgctgcccccaaaagcctgaccttcttggtcctgtgggtctgtcagtaaggcaggtagccatagctggagagagacagccaccaggctgggatcttggacagtccctacatttctgtgtaatcctggactaggcagggcatggagtagatggaaaatggcggccatcttggaaatgtgccataacaactcacttttcaagaccgtcccctagaggagaaaagtaccgccctgggtagctcaattaacgaattttcaagacccaggccttggcgctccttgcccggagatccaacggagactttagtccgacgccagagtggatcacagagcggacagggatacactgaaaaaaaacggtcaggagggacgttgcgccccccgcttggtagaacaggacgaccgctggcctcgcggagttgaggccaataaccccgcggaccccatgttgacccggaagaggaggccc

SEQ ID NO: 106 - DNA, 746 bp, Homo sapiens
  CDS (324)..(734)
ctgtggtggaattccagttgtaggcatgggtgcattagcgaaaaaacacacattccttgttctcatggagcctccattctaatgagaaaataaagacaataaaaacagcaaatgaagagttgctttttttaggtaatggtaagaaaaaataaatgacggagagtgactatggccattgcaggcttctccgaggaggtaatatttgaagagagaccaaataatgtgagaaagaaaggtaagtagctagctaaggaaaaaaagttctagggagatggaacagcaggtgcaaagggccagaggtagaagttttcaatggaagtaagatgagtggatctggaatggagctattgatggacacagggaaagaagatgaggtcatagtctgggcccagatgtgcctgtctcacctggtttctctttttcctgcagctactgccttcctcatcaacaaagtgccccttcctgttgacaagttggcacctttacctctggacaacattcttccctttatggatccattaaagcttcttctgaaaactctgggcatttctgttgagcaccttgtggaggggctaaggaagtgtgtaaatgagctgcgaccagaggcttctgaagctgtgaagaaactgctggtaaccacagcttgggaggctaatctgccaaaggggaggcatactcaccctgaatgtctagctcctcttcttgtcccttgtaaatgtgcatttccactttactgattatattct

SEQ ID NO: 107 - DNA, 930 bp, Homo sapiens
  CDS (81)..(779)
ttggaaaaccatttgacgcccgcggtaccggaccggaattcccgggtcgacccacgcgtccgatcggaggtgcctcagccatggcatggatccctctcttcctcggcgtccttgcttactgcacaggatccgtggcctcctatgagctgactcagccaccctcagtgtccgtgtccccaggacagacagccagcatcacctgctctggagataaattgggggataaatatgcttgctggtatcagcagaagccaggccagtcccctgtgctggtcatctatcaagatagcaagcggccctcagggatccctgagcgattctctggctccaactctgggaacacagccactctgaccatcagcgggacccaggctatggatgaggctgactattactgtcaggcgtgggacagcagcactctttatgtcttcggaactgggaccaaggtcaccgtcctaggtcagcccaaggccaaccccactgtcactctgttcccgccctcctctgaggagctccaagccaacaaggccacactagtgtgtctgatcagtgacttctacccgggagctgtgacagtggcctggaaggcagatggcagccccgtcaaggcgggagtggagaccaccaaaccctccaaacagagcaacaacaagtacgcggccagcagctacctgagcctgacgcctgagcagtggaagtcccacagaagctacagctgccaggtcacgcatgaagggagcaccgtggagaagacagtggcccctacagaatgttcataggttctaaaccctcacctccccccacgggagactagagctgcaggatcccaggggaggggtctctcctcccaccccaaggcatcaagcccttctccctgcactcaataaaccctcaataaatattctcattgtcaatcaaaaaaaaaagtcg

SEQ ID NO: 108 - DNA, 3133 bp, Homo sapiens
  CDS (219)..(1028)
gcggtttggtgcatgagcgtccggaccggaattcccgggtcgacccacgcgtccgggaagatgccaaagtctatgtggctaaagtggactgcacggcccactccgacgtgtgctccgcccagggggtgcgaggataccccaccttaaagcttttcaagccaggccaagaagctgtgaagtaccagggtcctcgggacttccagacactggaaaactggatgctgcagacactgaacgaggagccagtgacaccagagccggaagtggaaccgcccagtgcccccgagctcaagcaagggctgtatgagctctcagcaagcaactttgagctgcacgttgcacaaggcgaccactttatcaagttcttcgctccgtggtgtggtcactgcaaagccctggctccaacctgggagcagctggctctgggccttgaacattccgaaactgtcaagattggcaaggttgattgtacacagcactatgaactctgctccggaaaccaggttcgtggctatcccactcttctctggttccgagatgggaaaaaggtggatcagtacaagggaaagcgggatttggagtcactgagggagtacgtggagtcgcagctgcagcgcacagagactggagcgacggagaccgtcacgccctcagaggccccggtgctggcagctgagcccgaggctgacaagggcactgtgttggcactcactgaaaataacttcgatgacaccattgcagaaggaataaccttcatcaagttttatgctccatggtgtggtcattgtaagactctggctcctacttgggaggaactctctaaaaaggaattccctggtctggcgggggtcaagatcgccgaagtagactgcactgctgaacggaatatctgcagcaagtattcggtacgaggctaccccacgttattgcttttccgaggagggaagaaagtcagtgagcacagtggaggcagagaccttgactcgttacaccgctttgtcctgagccaagcgaaagacgaactttaggaacacagttggaggtcacctctcctgcccagctcccgcaccctgcgtttaggagttcagtcccacagaggccactgggttcccagtggtggctgttcagaaagcagaacatactaagcgtgaggtatcttctttgtgtgtgtgttttccaagccaacacactctacagattctttattaagttaagtttctctaagtaaatgtgtaactcatggtcactgtgtaaacattttcagtggcgatatatcccctttgaccttctcttgatgaaatttacatggtttcctttgagactaaaatagcattgagggaaatgaaattgctggactatttgtggctcctgagttgagtgattttggtgaaagaaagcacatccaaagcatagtttacctgcccacgagttctggaaaggtggccttgtggcagtattgacgttcctctgatcttaaggtcacagttgactcaatactgtgttggtccgtagcatggagcagattgaaatgcaaaaacccacacctctggaagataccttcacggccgctgctggagcttctgttgctgtgaatacttctctcagtgtgagaggttagccgtgatgaaagcagcgttacttctgaccgtgcctgagtaagagaatgctgatgccataactttatgtgtcgatacttgtcaaatcagttactgttcaggggatccttctgtttctcacggggtgaaacatgtctttagttcctcatgttaacacgaagccagagcccacatgaactgttggatgtcttccttagaaagggtaggcatggaaaattccacgaggctcattctcagtatctcattaactcattgaaagattccagttgtatttgtcacctggggtgacaagaccagacaggctttcccaggcctgggtatccagggaggctctgcagccctgctgaagggccctaactagagttctagagtttctgattctgtttctcagtagtccttttagaggcttgctatacttggtctgcttcaaggaggtcgaccttctaatgtatgaagaatgggatgcatttgatctcaagaccaaagacagatgtcagtgggctgctctggccctggtgtgcacggctgtggcagctgttgatgccagtgtcctctaactcatgctgtccttgtgattaaacacctctatctcccttgggaataagcacatacaggcttaagctctaagatagataggtgtttgtccttttaccatcgagctacttcccataataaccactttgcatccaacactcttcacccacctcccatacgcaaggggatgtggatacttggcccaaagtaactggtggtaggaatcttagaaacaagaccacttatactgtctgtctgaggcagaagataacagcagcatctcgaccagcctctgccttaaaggaaatctttattaatcacgtatggttcacagataattctttttttaaaaaaacccaacctcctagagaagcacaactgtcaagagtcttgtacacacaacttcagctttgcatcacgagtcttgtattccaagaaaatcaaagtggtacaatttgtttgtttacactatgatactttctaaataaactcttttttttaaaaagtctggtctttccttcaatgttacagcaaaacagatataaaatagacaataaattatagtttatatttacaaaaaaagctgtaagtgcaaacagttgtagattataaatgtattatttaatcagtttagtatgaaattgccttcccagtacatgattgtgaaaaagacatttagaaaatattctaaaatttaatctgagcctcactttctacaagggaaatcatgatttccgttcataaacagcatgctcatccccctaacaccattcttataagctgggcaccctcattttattttcttcgttggttctaaccctgtggcgtggtatgctgtatagtaaaaaggcagagatcccctttactgaaaaggtactagagccggcagtccagaagttaatgtgctggtcaaagaaccggacgcgtgggtcgacccgggaattccggaccggtacctgcaggcgtacggcttcaaagaggga

SEQ ID NO: 109 - DNA, 1471 bp, Homo sapiens
  CDS (92)..(1024)
gacgcctgcaggtaccggtccggaattcccgggtcgacgatttcgtgtcacaactctccccagagaaggtggtgtgtggccatcacggaagatgctgctgcttctgctgcttctggggccaggctccgggcttggtgctgtcgtctctcaacatccgagcagggttatctgtaagagtggaacctctgtgaagatcgagtgccgttccctggactttcaggccacaactatgttttggtatcgtcagttcccgaaacagagtctcatgctgatggcaacttccaatgagggctccaaggccacatacgagcaaggcgtcgagaaggacaagtttctcatcaaccatgcaagcctgaccttgtccactctgacagtgaccagtgcccatcctgaagacagcagcttctacatctgcagtgctagagagtcgactagcgatccaaaaaatgagcagttcttcgggccagggacacggctcacggtcacagaggacctgaaaaacgtgttcccacccgaggtcgctgtgtttgagccatcagaagcagagatctcccacacccaaaaggccacactggtgtgcctggccacaggcttctaccccgaccacgtggagctgagctggtgggtgaatgggaaggaggtgcacagtggggtcagcacagacccgcagcccctcaaggagcagcccgccctcaatgactccagatactgcctgagcagccgcctgagggtctcggccaccttctggcagaacccccgcaaccacttccgctgtcaagtccagttctacgggctctcggagaatgacgagtggacccaggatagggccaaacctgtcacccagatcgtcagcgccgaggcctggggtagagcagactgtggcttcacctccgagtcttaccagcaaggggtcctgtctgccaccatcctctatgagatcttgctagggaaggccaccttgtatgccgtgctggtcagtgccctcgtgctgatggccatggtcaagagaaaggattccagaggctagctccaaaaccatcccaggtcattcttcatcctcacccaggattctcctgtacctgctcccaatctgtgttcctaaaagtgattctcactctgcttctcatctcctacttacatgaatacttctctcttttttctgtttccctgaagattgagctcccaacccccaagtacgaaataggctaaaccaataaaaaattgtgtgttgggcctggttgcatttcaggagtgtctgtggagttctgctcatcactgacctatcttctgatttagggaaagcagcattcccttggacatctgaagtgacagccctctttctctccacccaatgctgctttctcctgttcatcctgatggaagtcctcaaacaccatttccatacccaggcattctgggtccccactggagggttagtctgaagggcaatggctgggctttggaaaaccag

SEQ ID NO: 110 - DNA, 1759 bp, Homo sapiens
  CDS (79)..(1734)
gttgaccactagaacgcctgcggtaccggtccggaattcccgggtcgacccacgcgtccggccctggcggatggagacatgctgcccctgctgctgctgcccctgctgtggggggggtccctgcaggagaagccagtgtacgagctgcaagtgcagaagtcggtgacggtgcaggagggcctgtgcgtccttgtgccctgctccttctcttacccctggagatcctggtattcctctcccccactctacgtctactggttccgggacggggagatcccatactacgctgaggttgtggccacaaacaacccagacagaagagtgaagccagagacccagggccgattccgcctccttggggatgtccagaagaagaactgctccctgagcatcggagatgccagaatggaggacacgggaagctatttcttccgcgtggagagaggaagggatgtaaaatatagctaccaacagaataagctgaacttggaggtgacagccctgatagagaaacccgacatccactttctggagcctctggagtccggccgccccacaaggctgagctgcagccttccaggatcctgtgaagcgggaccacctctcacattctcctggacggggaatgccctcagccccctggaccccgagaccacccgctcctcggagctcaccctcacccccaggcccgaggaccatggcaccaacctcacctgtcagatgaaacgccaaggagctcaggtgaccacggagagaactgtccagctcaatgtctcctatgctccacagaccatcaccatcttcaggaacggcatagccctagagatcctgcaaaacacctcataccttccggtcctggagggccaggctctgcggctgctctgtgatgctcccagcaacccccctgcacacctgagctggttccagggctcccctgccctgaacgccacccccatctccaataccgggatcttggagcttcgtcgagtaaggtctgcagaagaaggaggcttcacctgccgcgctcagcacccgctgggctccctgcaaatttttctgaatctctcagtttactccctcccacagttgctgggcccctcctgctcctgggaggctgagggtctgcactgcagatgctcctttcgagcccggccggccccctccctgtgctggcggcttgaggagaagccgctggaggggaacagcagccagggctcattcaaggtcaactccagctcagctgggccctgggccaacagctccctgatcctccacggggggctcagctccgacctcaaagtcagctgcaaggcctggaacatctatgggtcccagagcggctctgtcctgctgctgcaagggagatcgaacctcgggacaggagtggttcctgcagcccttggtggtgctggtgtcatggccctgctctgtatctgtctgtgcctcatcttctttttaatagtgaaagcccgcaggaagcaagcagctgggagaccagagaaaatggatgatgaagaccccattatgggtaccatcacctcgggttccaggaagaagccctggccagacagccccggagatcaagcatctcctcctggggatgcccctcccttggaagaacaaaaggagctccattatgcctcccttagtttttctgagatgaagtcgagggagcctaaggaccaggaggccccaagcaccacggagtactcggagatcaagacaagcaagtgaggatttgcccagagttcagtcctgg

SEQ ID NO: 111 - DNA, 4205 bp, Homo sapiens
  CDS (548)..(3733)
ccatgaaagcgtacgcacgacgaccggaccggaattcccgggtcgacgatttcgtacaggactggagggcttgaggaatgtggtggtccctctcttcgttgtttctgccccctgaggttgtgctttctcagggatatgcactctgcacttccattcctgcagtgaaattaactcgagcttggcagctcgagaggagaatgtggccactttccgaggctcagagtatctgtgctacgacctgtctcagaacccgatccagagcagcagtgatgaaatcaccctctcctttaagacctggcagcgtaacggcctcatcctgcacacgggcaagtcggctgactatgtcaacctggctctgaaggatggtgcggtctccttggtcattaacctggggtccggggcctttgaggccattgtggagccagtgaatggaaaattcaacgacaacgcctggcatgatgtcaaagtgacacgcaacctccggcaggtgacaatctctgtggatggcattcttaccacgacgggctacactcaagaggactataccatgctgggctcggacgacttcttctatgtaggaggaagcccaagtaccgctgacttgcctggctcccctgtcagcaacaacttcatgggctgccttaaagaggttgtttataagaataatgacatccgtctggagctgtctcgcctggcccggattgcggacaccaagatgaaaatctatggcgaagttgtgtttaagtgtgagaatgtggccacactggaccccatcaactttgagaccccagaggcttacatcagcttgcccaagtggaacactaaacgtatgggctccatctcctttgacttccgcaccacagagcccaatggcctgatcctcttcactcatggaaagccccaagagaggaaggatgctcggagccagaagaatacaaaagtagacttctttgccgtggaactcctcgatggcaacctgtacttgctgcttgacatgggctctggcaccatcaaagtgaaagccactcagaagaaagccaatgatggggaatggtaccatgtggacattcagcgagatggcagatcaggtactatatcagtgaacagcaggcgcacgccattcaccgccagtggggagagcgagatcctggacctggaaggagacatgtacctgggagggctgccggagaaccgtgctggccttattctccccaccgagctgtggactgccatgctcaactatggctacgtgggctgcatccgcgacctattcattgatgggcgcagcaagaacattcgacagctggcagagatgcagaatgctgcgggtgtcaagtcctcctgttcacggatgagtgccaagcagtgtgacagctacccctgcaagaataatgctgtgtgcaaggacggctggaaccgcttcatctgcgactgcaccggcaccggatactggggaagaacctgcgaaagggaggcatccatcctgagctatgatggtagcatgtacatgaagatcatcatgcccatggtcatgcatactgaggcagaggatgtgtccttccgcttcatgtcccagcgagcttatgggctgctggtggctacgacctccagggactctgccgacaccctgcgtctggagctggatggggggcgtgtcaagctcatggttaacttagactgtatcaggataaactgtaactccagcaaaggaccagagaccttgtatgcagggcagaagctcaatgacaacgagtggcacaccgttcgggtggtgcggagaggaaaaagccttaagttaaccgtggatgatgatgtggctgagggtacaatggtgggagaccatacccgtttggagttccacaacattgaaacgggaatcatgactgagaaacgctacatctccgttgtcccctccagctttattggccatctgcagagcctcatgtttaatggccttctctacattgacttgtgcaaaaatggtgacattgattattgtgagctgaaggctcgttttggactgaggaacatcatcgctgaccctgtcacctttaagaccaagagcagctacctgagccttgccactcttcaggcttacacctccatgcacctcttcttccagttcaagaccacctcaccagatggcttcattctcttcaatagtggtgatggcaatgacttcattgcagtcgagcttgtcaaggggtatatacactacgtttttgacctcggaaacggtcccaatgtgatcaaaggcaacagtgaccgccccctgaatgacaaccagtggcacaatgtcgtcatcactcgggacaatagtaacactcatagcctgaaagtggacaccaaagtggtcactcaggttatcaatggtgccaaaaatctggatttgaaaggtgatctctatatggctggtctggcccaaggcatgtacagcaacctcccaaagctcgtggcctctcgagatggctttcagggctgtctagcatcaggggacttgaatggacgcctgccagacctcatcaatgatgctcttcatcggagcggacagatcgagcgtggctgtgaaggacccagtaccacctgccaggaagattcatgtgccaaccagggggtctgcatgcaacaatgggagggcttcacctgtgattgttctatgacctcttattctggaaaccagtgcaatgatcctggcgctacgtacatctttgggaaaagtggtgggcttatcctctacacctggccagccaatgacaggcccagcacgcggtctgaccgccttgccgtgggcttcagcaccactgtgaaggatggcatcttggtccgcatcgacagtgctccaggacttggtgacttcctccagcttcacatagaacaggggaaaattggagttgtcttcaacattggcacagttgacatctccatcaaagaggagagaacccctgtaaatgacggcaaataccatgtggtacgcttcaccaggaacggcggcaacgccaccctgcaggtggacaactggccagtgaatgaacattatcctacaggccggcagttaaccatcttcaacactcaggcgcaaatagccattggtggaaaggacaaaggacgcctcttccaaggccaactctctgggctctattatgatggtttgaaagtactgaacatggcggctgagaacaaccccaatattaaaatcaatggaagtgttcggctggttggagaagtcccatcaattttgggaacaacacagacgacctccatgccaccagaaatgtctactactgtcatggaaaccactactacaatggcgactaccacaacccgtaagaatcgctctacagccagcattcagccaacatcagatgatcttgtttcatctgctgaatgttcaagtgatgatgaagactttgttgaatgtgagccgagtacagcaaaccccacggagccgggaatcagacgggttccgggggcctcagaggtgatccgggagtcgagcagcacaacagggatggtcgtcggcattgtggctgctgccgccctctgcatcttgatcctcctgtacgccatgtacaagtacaggaacagggacgaggggtcctatcaagtggacgagacgcggaactacatcagcaactccgcccagagcaacggcacgctcatgaaggagaagcagcagagctcgaagagcggccacaagaaacagaaaaacaaggacagggagtattacgtgtaaacatgcgaacactgctcacacgcgagttttcacagttatttctatccacgcctatgaatctttggacggtgagatctcacagatgtcagaactgctggaactatgaaatggggtatataaccacgactctggtggggaaaaccgttttttaaaggacacacacacacacagcgatgcatctctctctaaagctcagccacggctgcggcaaggtcccagcggtcgctgggagacagaaggttttgtgccctgctgtatcataaagcacacacttagcgctctggagccggacggtggctccaccacttccgcaggcctagaaacttccttctccggaggaccttttactaaaaggtagaagacttcatggcttacttgttccataactccaagtgagtctgtaatgtttgtgaagcttgactgtaaccatgttttttctgtttaattatgtaaaaaacaaaactacaacaac

SEQ ID NO: 112 - DNA, 4295 bp, Homo sapiens
  CDS (548)..(3823)
ccatgaaagcgtacgcacgacgaccggaccggaattcccgggtcgacgatttcgtacaggactggagggcttgaggaatgtggtggtccctctcttcgttgtttctgccccctgaggttgtgctttctcagggatatgcactctgcacttccattcctgcagtgaaattaactcgagcttggcagctcgagaggagaatgtggccactttccgaggctcagagtatctgtgctacgacctgtctcagaacccgatccagagcagcagtgatgaaatcaccctctcctttaagacctggcagcgtaacggcctcatcctgcacacgggcaagtcggctgactatgtcaacctggctctgaaggatggtgcggtctccttggtcattaacctggggtccggggcctttgaggccattgtggagccagtgaatggaaaattcaacgacaacgcctggcatgatgtcaaagtgacacgcaacctccggcaggtgacaatctctgtggatggcattcttaccacgacgggctacactcaagaggactataccatgctgggctcggacgacttcttctatgtaggaggaagcccaagtaccgctgacttgcctggctcccctgtcagcaacaacttcatgggctgccttaaagaggttgtttataagaataatgacatccgtctggagctgtctcgcctggcccggattgcggacaccaagatgaaaatctatggcgaagttgtgtttaagtgtgagaatgtggccacactggaccccatcaactttgagaccccagaggcttacatcagcttgcccaagtggaacactaaacgtatgggctccatctcctttgacttccgcaccacagagcccaatggcctgatcctcttcactcatggaaagccccaagagaggaaggatgctcggagccagaagaatacaaaagtagacttctttgccgtggaactcctcgatggcaacctgtacttgctgcttgacatgggctctggcaccatcaaagtgaaagccactcagaagaaagccaatgatggggaatggtaccatgtggacattcagcgagatggcagatcaggtactatatcagtgaacagcaggcgcacgccattcaccgccagtggggagagcgagatcctggacctggaaggagacatgtacctgggagggctgccggagaaccgtgctggccttattctccccaccgagctgtggactgccatgctcaactatggctacgtgggctgcatccgcgacctattcattgatgggcgcagcaagaacattcgacagctggcagagatgcagaatgctgcgggtgtcaagtcctcctgttcacggatgagtgccaagcagtgtgacagctacccctgcaagaataatgctgtgtgcaaggacggctggaaccgcttcatctgcgactgcaccggcaccggatactggggaagaacctgcgaaagggaggcatccatcctgagctatgatggtagcatgtacatgaagatcatcatgcccatggtcatgcatactgaggcagaggatgtgtccttccgcttcatgtcccagcgagcttatgggctgctggtggctacgacctccagggactctgccgacaccctgcgtctggagctggatggggggcgtgtcaagctcatggttaacttagactgtatcaggataaactgtaactccagcaaaggaccagagaccttgtatgcagggcagaagctcaatgacaacgagtggcacaccgttcgggtggtgcggagaggaaaaagccttaagttaaccgtggatgatgatgtggctgagggtacaatggtgggagaccatacccgtttggagttccacaacattgaaacgggaatcatgactgagaaacgctacatctccgttgtcccctccagctttattggccatctgcagagcctcatgtttaatggccttctctacattgacttgtgcaaaaatggtgacattgattattgtgagctgaaggctcgttttggactgaggaacatcatcgctgaccctgtcacctttaagaccaagagcagctacctgagccttgccactcttcaggcttacacctccatgcacctcttcttccagttcaagaccacctcaccagatggcttcattctcttcaatagtggtgatggcaatgacttcattgcagtcgagcttgtcaaggggtatatacactacgtttttgacctcggaaacggtcccaatgtgatcaaaggcaacagtgaccgccccctgaatgacaaccagtggcacaatgtcgtcatcactcgggacaatagtaacactcatagcctgaaagtggacaccaaagtggtcactcaggttatcaatggtgccaaaaatctggatttgaaaggtgatctctatatggctggtctggcccaaggcatgtacagcaacctcccaaagctcgtggcctctcgagatggctttcagggctgtctagcatcaggggacttgaatggacgcctgccagacctcatcaatgatgctcttcatcggagcggacagatcgagcgtggctgtgaaggacccagtaccacctgccaggaagattcatgtgccaaccagggggtctgcatgcaacaatgggagggcttcacctgtgattgttctatgacctcttattctggaaaccagtgcaatgatcctggcgctacgtacatctttgggaaaagtggtgggcttatcctctacacctggccagccaatgacaggcccagcacgcggtctgaccgccttgccgtgggcttcagcaccactgtgaaggatggcatcttggtccgcatcgacagtgctccaggacttggtgacttcctccagcttcacatagaacaggggaaaattggagttgtcttcaacattggcacagttgacatctccatcaaagaggagagaacccctgtaaatgacggcaaataccatgtggtacgcttcaccaggaacggcggcaacgccaccctgcaggtggacaactggccagtgaatgaacattatcctacaggcaacactgataatgaacgcttccaaatggtaaaacagaaaatccccttcaaatataatcggcctgtagaggagtggctgcaggaaaaaggccggcagttaaccatcttcaacactcaggcgcaaatagccattggtggaaaggacaaaggacgcctcttccaaggccaactctctgggctctattatgatggtttgaaagtactgaacatggcggctgagaacaaccccaatattaaaatcaatggaagtgttcggctggttggagaagtcccatcaattttgggaacaacacagacgacctccatgccaccagaaatgtctactactgtcatggaaaccactactacaatggcgactaccacaacccgtaagaatcgctctacagccagcattcagccaacatcagatgatcttgtttcatctgctgaatgttcaagtgatgatgaagactttgttgaatgtgagccgagtacagcaaaccccacggagccgggaatcagacgggttccgggggcctcagaggtgatccgggagtcgagcagcacaacagggatggtcgtcggcattgtggctgctgccgccctctgcatcttgatcctcctgtacgccatgtacaagtacaggaacagggacgaggggtcctatcaagtggacgagacgcggaactacatcagcaactccgcccagagcaacggcacgctcatgaaggagaagcagcagagctcgaagagcggccacaagaaacagaaaaacaaggacagggagtattacgtgtaaacatgcgaacactgctcacacgcgagttttcacagttatttctatccacgcctatgaatctttggacggtgagatctcacagatgtcagaactgctggaactatgaaatggggtatataaccacgactctggtggggaaaaccgttttttaaaggacacacacacacacagcgatgcatctctctctaaagctcagccacggctgcggcaaggtcccagcggtcgctgggagacagaaggttttgtgccctgctgtatcataaagcacacacttagcgctctggagccggacggtggctccaccacttccgcaggcctagaaacttccttctccggaggaccttttactaaaaggtagaagacttcatggcttacttgttccataactccaagtgagtctgtaatgtttgtgaagcttgactgtaaccatgttttttctgtttaattatgtaaaaaacaaaactacaacaac

SEQ ID NO: 113 - DNA, 689 bp, Homo sapiens
  CDS (183)..(323)
attggaattcgaagctgtacgcctgcaggtaccggtccggaattcccgggtcgaggctgaggcccacgtttttaccccagcttgaggctgaggtgggctctgtgctcctggtgctgccaagcccttgcctgctatccacaggcctgaggtgcaggcctccctcagacagtgacgggttacacatggggtccctgatgccactcagacccctggcactccacactgcccttggggctgctctgaacttctccttgccttgtgagtggtcaacactgcccagtgcaagtgaggctggaaggctttggggacctccaagttttcagtaaccctgtgttaccccaagggaattgttttgcccacagattttagcaggttggagctttcaatctgtcctgttttgggggtttgtggcttagatgctgggatgagagaagccacctaaatccaaaggaaggagtttgcagcgtgttgcatcagccagccagcagacacccagctgtcatttgcattctcagcaacaaaagccttggcccctcatgactatgggtgtcacctgccctgtgtggcccagggccaggtggaagccatccatgactgagtaaaatcagagtagcatcctgctctgctctcctgtttgcaagggtaggagttggctgaaaaccagctgaagagtggcaagtgtgaatgct

SEQ ID NO: 114 - DNA, 1822 bp, Homo sapiens
  CDS (118)..(1494)
ggggaaaactcccgggtcgacccacgcgtccgcccacgcgtccgctggggctgagagttcacctgtctcaggaaccacctgagcccacagatcctgtgggcagcggccagggcagccatggcttgggcaagtaggctgggcctgctgctggcactgctgctgcccgtggtcggtgcctccacgccaggcaccgtggtccgactcaacaaggcagcattgagctacgtgtctgaaattgggaaagcccctctccagcgggccctgcaggtcactgtccctcatttcctggactggagtggagaggcgcttcagcccaccaggatccggattctgaatgtccatgtgccccgcctccacctgaaattcattgctggtttcggagtgcgcctgctggcagcagctaattttactttcaaggtctttcgcgccccagagcccctggagctgacgctgcctgtggaactgctggctgacacccgcgtgacccagagctccatcaggacccctgtggtcagcatctctgcctgctctttattctcgggccacgccaacgagtttgatggcagtaacagcacctcccacgcgctgctggtcctggtgcagaagcacattaaagctgtcttgagtaacaagctgtgcctgagcatctccaacctggtgcagggtgtcaatgtccacctgggcaccttaattggcctcaaccccgtgggtcctgagtcccagatccgctattccatggtcagtgtgcccactgtcaccagtgactacatttccctggaagtcaatgctgttctcttcctgctgggcaagcccatcatcctgcccacggatgccaccccttttgtgttgccaaggcatgtgggtaccgagggctccatggccaccgtgggcctctcccagcagctgtttgactctgcgctcctgctgctgcagaaggccggtgccctcaacctggacatcacagggcagctgaggtcggatgacaacctgctgaacacctctgctctgggccggctcatcccggaggtggcccgccagtttcccgagcccatgcctgtggtgctcaaggtgcggctgggtgccacacctgtggccatgctccacacaaacaacgccaccctgcggctgcagcccttcgtggaggtcctggccacagcctccaactcggctttccagtccctcttctccctggatgtggtagtgaacttgagactccagctctctgtgtccaaggtgaagcttcaggggaccacgtctgtgctgggggatgtccagctcacggtggcctcctccaacgtgggcttcattgatacagatcaggtgcgcacactgatgggcaccgtttttgagaagcccctgctggaccatctcaatgctctcttggccatgggaattgccctccctggtgtggtcaacctccactatgttgcccctgagatctttgtctatgagggctacgtggtgatatccagtggactcttctaccagagctgaggcaagaccactgggaggcctgagagtgggccagctcgctgctcaggcgaatttctcatttcaagccactggggaaactgaggcaaaaccatacttagtcatcaccaacaagctggactgcttagctgggctgttttatcttccctgagtgcctgggtctccctccctcacttctgccctttcccttcctcctcctcttctcctccctcttccctcatctcccccctccttcctctgccccaccccaggggggagcagactgctcctccaggctgtatagacctgccctcttgcattaaacaacttctcttgagctgcaaaaaaaaaa

SEQ ID NO: 115 - DNA, 674 bp, Homo sapiens
  CDS (190)..(390)
acccacgcgtccgcccacgcgtccgcccacgcgtccgttcacgcgtccggttgaactcatgataggtgcagaaatttcagtaaaaataatgtgacatcggcagagctgtcatagatctgggatatggctggaaggacatagagtaaatgatcggtctggttcatcgctaaaggagacttaggaacctagatgaagttggtacttctgagaaagacatctctttctgttttcactactctattctcagtatccagttctcagtacccagttctcagtacctctatttgtaatactcctgtatttagtactttgtttttagtgtcctgttctgttaaccctcttcctagtaccgtatttttagtactgctatactcagttgcctgtctgtagtacccctgtacgtagtactcttttcttacaactctgttcccagtacccctatgtttagtcccttgttctcatgttctcactaccccaatacttaatatactttgttctcagtatccttgttgttagtaccctgttctcactaccccttttcttagtacccctgaggggggaaaaaaaggatgataatggggtataagtctcaaaaaacttttggattgtttgatttgaactgagtcaaaggtaaaaccagtgttctggagttcgacttctgggtgcaaatccct

SEQ ID NO: 116 - DNA, 1029 bp, Homo sapiens
  CDS (461)..(982)
gacagacagagtgtgcttggcagaagcccggtgaccagctgcagtcacccacagcagcgttgtgcaaatctagaaaaagtgccccttcctctggctcctgcagttccagggtgcccaggcccccagccaagagcgtgtacaggtggccctgctgacacacagaatccttgggagaacaaagcctccccggggttcggggacaggtggatgggaggtagtcctggccagaggtatctggggaggctgggggccttgcggggtgaggcagggcaagggtgtgagtcactgccaggctgccaaagctcactctgcagctgtccagtcccctggggtagccccaagcctgtccttgtagggagtggcagccggagtctgaactgtcctgggggaccaagcaggagcttaagatgggcaagacctggggccctgggcagacgcatcaaagcaggcagaagcaggcatggccagcaggaagaccaagaagaaggaagggggtgccctccgggcccagagagcctcatccaatgtcttctccaactttgagcagactcagatccaggagttcaaggaggcattcacactcatggatcagaaccgagatggcttcattgacaaggaggacctgaaggacacctatgcctccctgggcaagaccaacgtcaaggacgacgagctggacgccatgctcaaagaggcctcggggcccatcaacttcaccatgtttctgaacctgtttggggagaagctgagcggtaccgacgccgaggagaccattcttaacgccttcaagatgctggacccggacgggaaagggaaaatcaacaaggagtacatcaagcgtctgctgatgtcccaggctgacaagatgacggcggaagaggtggaccagatgttccagttcgcctccatcgatgtggcgggcaacctggactacaaggcgctcagctacgtgatcacccacggggaggagaaggaggagtgagacccagccgggtcaataaacctggacgcttggaaaaaaaaaaaaaa

SEQ ID NO: 117 - DNA, 878 bp, Homo sapiens
  CDS (382)..(573)
cacttttcgggtcgacacacgcgcgcgcgagcagtagcctatctgtagacagttctcatgaagagctgtctggccatcttctttgaacagatgcgtgtggctgccctgccgggatgattacagcactatggaactaatattctttgaatgatgcgctcttattatttgaaaaatcaggaggcctggtcttcaggattcccctcctcttccactccccatcctccttgagagcagtatatactgggaatgcctgtcaggcgacctttcacttacagcccatggcagctgatagcatttctagtcgattttggtccataattgaggcaaatataagtggggcaggaccttgaagaatgatataattagttagtcgagtgttttatgttgttagctaagcgctatgctaagtatttcatttattttatcttctttaatcctgttttaatccccattctacaaagaaggatcctgagacttggtgagatccatattgctggccagtgcagagctgggtccctccagtctctgcctttacctgccaacctgcatagcatcctggatattcttgcatagccacatagacatttgtttgtacttttagtatgtgttgggtacagtgcatgtttttagctattttctcaagcatctgggaagttctaactctgttttattgatgaggaaactgggtcttgaaatccaggcctatacctgtctgaatgtaacgccccgcaggaaagtgggacattgagaaagagccacaggtgggaaaccctaatacctcggattggatactggctctaccgtgaaccaacccttgggattttggacaagcggctataaccctgttgggccttaactttcttgatcaaaaaaagaac

SEQ ID NO: 118 - DNA, 1656 bp, Homo sapiens
  CDS (89)..(1051)
gcggccgccgaggcctgggtggaagttggcgctgctgccgccgccctgcagcccactcgctgcctcggcagcgcgctgctcttctaagatggctgccgctaccggtgcggtggcagcctcggccgcctcgggtcaggcggaaggtaaaaagatcaccgatctgcgggtcatcgatctgaagtccgagctgaagcggcggaacttagacatcaccggagtcaagaccgtgctcatctcccgactcaagcaggctattgaagaggaaggaggcgatccagataatattgaattaactgtttcaactgatactccaaacaagaaaccaactaaaggcaaaggtaaaaaacatgaagcagatgagttgagtggagatgcttctgtggaagatgatgcttttatcaaggactgtgaattggagaatcaagaggcacatgagcaagatggaaatgatgaactaaaggactctgaagaatttggtgaaaatgaagaagaaaatgtgcattccaaggagttactctctgcagaagaaaacaagagagctcatgaattaatagaggcagaaggaatagaagatatagaaaaagaggacatcgaaagtcaggaaattgaagctcaagaaggtgaagatgatacctttctaacagcccaagatggtgaggaagaagaaaatgagaaagaagggagcctagctgaggctgatcacacagctcatgaagagatggaagctcatacgactgtgaaagaagctgaggatgacaacatctcggtcacaatccaggctgaagatgccatcactctggattttgatggtgatgacctcctagaaacaggtaaaaatgtgaaaattacagattgtgaagcaagtaagccaaaagatgggcagggcgccattgcacagaggccggataaggaaagcaaggattatgagatgaatgcgagccataaagatggtaagaaggaagactgcgtgaagggtgaccctgtcgagaaggaagccagagaaagttctaagaaagcagaatctggagaccaaagaaaaggattactttgaagaaagggccctcgtctactggggcctctggtcaagcaaagagctcttcaaaggaatctaaagacagcaagacatcatctaaagatgacaaaggaagtacaagtagtactagtggtagcagtggaagctcaactaaaaatatctgggttagtggactttcatctaataccaaagctgctgatttgaagaacctctttggcaaatatggaaaggttctgagtgcaaaagtagttacaaatgctcgaagtcctggggcaaaatgctatggcattgtaactatgtcttcaagcacagaggtgtccaggtgtattgcacatcttcatcgcactgagctgcatggacagctgatttctgttgaaaaagtaaaaggtgatccctctaagaaagaaatgaagaaagaaaatgatgaaaagagtagttcaagaagttctggagataaaaaaaatacgagtgatagaagtagcaagacacaagcctctgtcaaaaaagaagagaaaagatcgtctgagaaatctgaaaaaaaagaaagcaaggatactaagaaaatagaaggtaaagatgagaagaatgataatggagcaagtggccaaacatcagaatcgatt

SEQ ID NO: 119 - DNA, 906 bp, Homo sapiens
  CDS (221)..(397)
accgccccggaattcccgggtcgacccacgcgtccggatgcctgtccagactttgccaataggagcacctttaagctggcatgtggttgtaacagcctaacccgtcttttttagagtgataggccatgctaatcttactctctgctccagccttgaaactggccattttttcaaggagccagggttctttttctttgggaacagttaccagcatctgagtatgctcatcgtttcggggtatctctgcttctgtgcccttcagtggactgagctaggaaatgtatgtgtgtgtgcacacatatgccgttgcacacacatgcaggtttcagggatcacaagtccggtccatgtccacatccatagggttctttcttgccttatccatttcacctcttagagcagaggactttcaccatttctattgaacatgagtataatatgtagtccttacctaagaggattctgtggatcttctctggggttctcaggggccatggaacatgtcagagcaaatgttggaatggattacccagaatgtgagtagtgtgagtggggcactgttggactcagtcccaaccccctaacgcgagtttgcatgaaaaattcatatcttacttagggccatcctaactttcttgcttcccaaagggagggtagatcaaaacataagggaaaggaggggtcataaacttgttttgaaggtacccgggggaaccctaaacattataggggtctagtctatggccgactagtcgcgactataaacgaagccttcatcatagggaaaaaggtgcaggactttcttacacatggctagtagaacgggtctaggctagcatgagaccttccatgcaccagccagcatcctgtcttgtactactgaagccttttcctctagaaaacacg

SEQ ID NO: 120 - DNA, 862 bp, Homo sapiens
  CDS (140)..(355)
catggtaggcactcagtggataccagtggtggaaggtggaggcaaagagcccttttataaaacaacaaggttaggaactcctctggcaggagccaagttcctccgagtttagatcacttcacataatgtgcccttgctaatgcatttgctggtttctcacgccttcctgccttttcctctccatggttactctgggaggcagagaggtgctaagcaatggaggtgtcatccggcccgcgcatctagggaacgtccttcagaggacaacttgtcaccagccgtcaaagaagagagtggctttgtggtctctgaacatctggcagcgctgcacaggaagctgagggggtgtcattaattgtgatgaaataatttaaaccatcaggaataaatgaggctgttaagctaagttcagattccatttgccatgcacatgtgtctagcagcctgtgtgcagttaaaagaaattgaattatattagctcatgagtagaagtgaaacagatactgtaaatgaaacaagttgctgtatagcgatgacatcgtgttgaaccatttcacagagttacagtttgtatgatcactgtatcaaaagtggtatattatttaatgaatttttatattataaaacattcctacggtatggagtatagtaaggaccagtggtttatgggtaggtagagaggatgtgagctggatgggcagaacaaaacaatccacaggttacgggccttgaagggagtgggagggaaatcacgcgtcattggagcccagttgccctgttagagcccgaacggagtccacatcacgccgcctgcacttgggcatacgcgatcacgggaacgctccagtggatccagatcgac

SEQ ID NO: 121 - DNA, 1113 bp, Homo sapiens
  CDS (24)..(956)
gtggtgtgaggccatcacggaagatgctgctgcttctgctgcttctggggccagcaggctccgggcttggtgctgtcgtctctcaacatccgagcagggttatctgtaagagtggaacctctgtgaagatcgagtgccgttccctggactttcaggccacaactatgttttggtatcgtcagttcccgaaacagagtctcatgctgatggcaacttccaatgagggctccaaggccacatacgagcaaggcgtcgagaaggacaagtttctcatcaaccatgcaagcctgaccttgtccactctgacagtgaccagtgcccatcctgaagacagcagcttctacatctgcagtgctagtggtatgagacgcacagatacgcagtattttggcccaggcacccggctgacagtgctcgaggacctgaaaaacgtgttcccacccgaggtcgctgtgtttgagccatcagaagcagagatctcccacacccaaaaggccacactggtgtgcctggccacaggcttctaccccgaccacgtggagctgagctggtgggtgaatgggaaggaggtgcacagtggggtcagcacagacccgcagcccctcaaggagcagcccgccctcaatgactccagatactgcctgagcagccgcctgagggtctcggccaccttctggcagaacccccgcaaccacttccgctgtcaagtccagttctacgggctctcggagaatgacgagtggacccaggatagggccaaacctgtcacccagatcgtcagcgccgaggcctggggtagagcagactgtggcttcacctccgagtcttaccagcaaggggtcctgtctgccaccatcctctatgagatcttgctagggaaggccaccttgtatgccgtgctggtcagtgccctcgtgctgatggccatggtcaagagaaaggattccagaggctagctccaaaaccatcccaggtcattcttcatcctcacccaggattctcctgtacctgctcccaatctgtgttcctaaaagtgattctcactctgcttctcatctcctacttacatgaatacttctctcttttttctgtttccctgaagattgagctccc

SEQ ID NO: 122 - DNA, 767 bp, Homo sapiens
  CDS (167)..(325)
  misc_feature (1)...(767): n = a,t,c or g
atttggccctcgaggccaagaattcggcacgaggggagttgaaggccactttcttggttggccctaagtggttgagagttcacaaacaccactccctccctgaggactaacagccattgactactggtctgcttgttaactgactctccagagctccccatgagctatgagtgtgggacttcacctgggatttcttgcttggtttcttccctttctaattcccacttctccccttcccttactatttcaactgggagcacttcctaatgaatcacttgcactttatgcttggctcagggattgcttctgggagaacataacctaaaatgtccaacaataaggaacagttaatgacatccatccaacacaatatcctttggctgttaagaacctatctctgaagaaaacttaaagacatggtaatacattctggatatatcttaactggaaaaaagtatggcataattaactatgtaaaaattatacacaggcacaaattatccaggtgtggtggcgggtgcttgtactgccagctacttgggaggctgaggcaggagaatggcgtgaacccaggaggcggagcttgcagtgagccgagatcccaccactggactccattctggcgaaagagcagagactcgtcccaaaaaaaagaaaaaaaaggttgtttttgaggggccggcggtttttccttttggggggtaaaattattgggcctgggcggggtttaaaacgggggggggaaaaaacngnttttcccnaaaaaa

SEQ ID NO: 123 - DNA, 814 bp, Homo sapiens
  CDS (124)..(324)
acctgatgaccaatttaatacgactcactatagggaatttggccctcgaggccaagaattcggcacgagtctatctgcagagctacctctacattttaacttaggttagttgtttcccttggaatgtcttctccgtgttttcaatgttttcacctatgttgtaccattaaggtctggcccctgtgccaccacctacagaaagcctttcctgatttctctattcatgtcttctctgaaagggatctttcttctttctgtgaagtccaacttttaaaaatatgtttacaaaaatacttcttaggatcattaatgcattgttcctaagtcagagttctctgtgaatttattctatacaatcttctagtgctagtatataaactccttaagaacaagaatttgctcatgatagtagtcccctgcagtgtgtagattacataagtgttgagtaaatcttggagatcaggtatcctcattcaagaggaaaatgaataagagatccagttcagagacctacagtgagtgctctccgctgcaggcagggattgatgagctgcttcaactcttaccacccaccactctcaatcctatactctaactaatgaactctgctcaccgttgtccaagtgagttgaccctttggcctttccatgccgaggcctgtgcacctttctgaacttggaatgcctttactttttggaaaaaaataagcctctgggccgaaaaaggccctggttctttgtgggtccctggggtggggaaaaaaatggtccttttttttttccccgggggcgggggaaacccccaacaaaaggtt

SEQ ID NO: 124 - DNA, 784 bp, Homo sapiens
  CDS (77)..(292)
  misc_feature (1)...(784): n = a,t,c or g
atttggccctcgaggccaagaattcggcacgagtctttttttcatttttgcttatttatttctattctttgttgatatggaaaaatattttcacacagttatgatcaagttgtgccatcaactttataacgtatatgtgtgctttttccatttaattgttttgggagatattgctatagactacattattgttcccaatatttcctacctctctatatctataccctttgtagttactaacattagaggtagagatattttccacccctgtaatgtggccttggtcatgtgacttggaatgttagtagttctgatgtgcacagaggctgtacatggactttcagcattgggtttactctctcgggtttctgctgtttccatacaaagaatgtaccctgggtggcccaccagccactgagatatgtgaatccaacttgaactcaactcatggcctggagccaagttccaccagtcctaactagcttagccaaaatccagctgatctgaaagtgcatgaatgagaaataaaagcttattattttttttannannaannannnaaaaaaaaaagacttttttttagggggggggggggttttctccttttcgaggggggaaattaataaaatgagtggcgcccccctcttcccttgcgcgagggggtaaaaggcccggnnnnnnnccggccccccccccgccccccccccccggcggaaagccggaaaaggngggggggggnggggngaagtggggtgtccccccccccacccccccccccactaat

SEQ ID NO: 125 - DNA, 597 bp, Homo sapiens
  CDS (314)..(463)
atttggccctcgaggccaagaattcggcacgagcaatctgaagatatggttggaatatttgtctactccctgaatatttgatatagttcatgtttttaggtgtgataacatatggctatgttttttaaaagacatatttaaaagacatacctatccatactgacataaatatggctgaaaagatatgcttgtgtgatgtaatttaaataatttggagggaggatcaggagttaatgttgaaactcaattggctttgagttggttataatcaagcatgtgagcatttcttatactggaacctttacttttgcagatgtttgtaatgttttatgaaaataaaagaagagaatacctccaagacatgctgctttcttatagattattagttgcaatcttagttttgctgaagaaattaacagaacttaatacaattactcttatttgcaagtctataattttctaaacctaactctgatgcagtcctactcctaatatttacaaggcctagaacaagagtatataaatggcagcccacattctacgggtctaaatatatacaagttataaaccaagtcagcaaaataaaatgccatgtat

SEQ ID NO: 126 - DNA, 580 bp, Homo sapiens
  CDS (163)..(318)
tacgactcactatagggaatttggccctcgaggccaagaattcggcacgagatggcttatttaaaaagtagaatgtttatgtatttaaacagataaaatttagaatgattttaattccagggtaaaatctgctccgaccagagagaaaaaactaattcatatatgaatatagtatttgtaatcctcttgtttaaagacatgcaagttctagaagtatttgtactgcttaatgttttaacaactctaacaataatagcagcgggcatactttgtaccagtttttgctgtaagccttttatatatattaatcctctttaaaaccaccctatcaagtacaagataataatttgatatggttgatgaagcaactgatgggaaaaaagagaggttaaataatttgccccaaatcttattaagtgatgtagccagcatctgaacccaatcagactgtagactagagcctcctcccaaccactcagctttgctgcttcccacatactagttacataactactgtatgactatagaggtcaggttatcagccttctagaatcagtaatgttttctgtcaaaaaaaaaa

SEQ ID NO: 127 - DNA, 821 bp, Homo sapiens
  CDS (91)..(273)
atttggccctcgaggccaagaattcggcacgagctggtactagaactcacagaactgccacagaaggctgaacagtcctgggcttttcacatgatcaggttcgcacttccatggttctcccaaatatggctttctaaacaaacttggactaggctcactcacttggcatttctcctgcaggaatgcaactcaatgttctatccaaaggtttcaagaacgacagtttttggatgtttatttaatcctctctcaagccgtgtttgttttgaataaatggcaaatgtgattagtaaatggaacattcattttgttagactgcctctaaactccagatataaatgggctggattttacagcttattttaacatttcctttttcctataccctttctctgatcagctcttcaacggtgatataatttcttttaatgcaaatgtacaaaacaatgttagtcctgacttttggcaagcagttcacaagtttgggtgaaaagacattgctcttgaaaaacaggtcatttttagttttgctatgtctttccttctcactaggacatattgtgctgatgcacaacaatggagctaaggaggtctttagcttgtcttgcatctatcacaactcagcagcactttcctctttgacggtccatgctattggctacaatctttgcccttcccgccatcccactctatagtcccccaattcacccctcgccttgcgggtcgactcacgacactcgggccaggccgcctacaaccagctaccgactacatcacccccccctcgccttgagaccactttgccgactccgggcccaccc

SEQ ID NO: 128 - DNA, 412 bp, Homo sapiens
  CDS (63)..(329)
atttggccctcgaggccaagaattcggcacgagctattttgagttctagattccagtcttagatgaccaacttctttcatcttttactaccacttctaccatctctcttttccccctcctcaaaaacgcatagcttcaatattcataagatcatcatcatcatccttttcttcaacagcattttcttgtatcctagagattaccttaaaataaggaattggctacaaagtaataccttggaaagagaaatagaatggatcacctctataaggtgcttatgtaactctggaactacgtttatatttccattaaccacaaagtccacatgagtcatacttatttttctgtctcaggctactaaaatagaacatgttctctagaggagaacatcaaggagttcttttatttgtcg

SEQ ID NO: 129 - DNA, 2412 bp, Homo sapiens
  CDS (979)..(2277)
cccgcgatctcagacttcctagactccagaactgtaagaaataaatctctgtttgttataaattaccaagtctcagatattctattatagcagtacactaacgttcacgtgcattttcccagcggaggaaagatggttgttcttcatcagagtctggggcccaagaacgcaggctccatctcctcccgcaggagccaggctgatgatgctcgcagggatcggatactgggagcccctgaacgcagccaacccggcgcgcaccggtgggggcgtctgcgctggcggagcggctccccgggaggacgctgggaaccatgctctagccagccgctgcgcaggcgcactgggccccgactgcccgccgcagcgctacgtgggagcttggccgcgcagtgccggaacccggctgcagcggtgggaaggcgggggcgtgccggcccagcggggagaggcatctgcaggggctgctgagagtaaatacttggcgcctccagctgctggccaaggagacagatggagctcaagttgggagatacgccctgagagccgatgatagacacaagtccagatctcggattttgatactgtatgttccctgggttcctgagagaggacattgaggagtaggagtcggcgattaaggagatcggtacaattgggaagcctcctgtcagagcttccagcaatttcctcatcagaggtggacaagccctatgggctaagacagagggtcctcagaaaggagtgcggacgccgtcatgctgcagcagctcctgatcaccctgcccaccgaggccagcacctgggtgaagttgcgtcatccaaaggcggccacggagcgggtggccctgtgggaggatgtgactaagatgtttaaagcagaaggaactgttaaccttcaaggacgtatctgtggacttcactcaggaggagtgggggcagctggcccctgctcaccggaatctgtaccgggaggtgatgctggagaactatgggaacctggtctcagtgggatgtcagctttccaaacctggcgtgatttcccagttggagaaaggagaagaaccatggctgatggagagagatatttcaggagttccaagttcagacttgaagagcaaaacaaaaaccaaagagtcagccttacagaatgatatttcgtgggaagaactacattgtggcctaatgatggaaagatttacaaaaggaagcagcatgtattccaccttgggaagaatctccaaatgtaataagctagaaagccaacaagagaaccaaagaatgggtaaggggcaaatccccctgatgtgcaagaaaacattcactcaggagagaggccaagagtctaatagatttgagaaaagaattaatgtgaagtcagaagttatgccaggaccaataggtcttccaagaaaaagagatcgtaaatatgacacacctggaaagagaagcagatacaacatagatttagttaatcattcaaggagttatacaaaaatgaaaacctttgagtgtaatatttgtgaaaaaatcttcaaacagcttattcaccttactgaacacatgagaattcataccggggagaaacctttcagatgtaaggaatgtggaaaagcctttagccaaagttcatctcttattccgcatcagagaattcatactggtgagaaaccctatgaatgtaaggagtgtgggaaaaccttcagacatccttcatcgcttactcaacatgttagaattcataccggggaaaagccctatgaatgtagggtatgtgagaaagccttcagccagagcattggactgatccagcatttgagaactcatgttagagagaaaccttttacatgcaaagactgtggaaaagcgtttttccagattagacaccttaggcaacatgagattattcatactggtgtgaaaccctatatttgtaatgtatgtagtaaaaccttcagccatagtacatacctaactcaacaccagagaactcatactggagaaagaccatataaatgtaaggaatgtgggaaagcctttagccagagaatacatctttctatccatcagagagtccatactggagtaaaaccttatgaatgcagtcattgtgggaaagcctttaggcatgattcatcctttgctaaacatcagagaattcatactggagaaaaaccttatgattgtaatgagtgtggaaaagccttcagctgtagttcatcccttattagacactgcaaaacacatttaagaaataccttcagcaatgttgtgtgaaatatactaaacatcaaagaatctatgttggagcacaagattctaaatcagtggttccctgatccctcaaaaatccatttgtttttggatttccaaaaacgaacattaaaaaaaaatggtttggcaaaaaaaaaa

SEQ ID NO: 130 - DNA, 905 bp, Homo sapiens
  CDS (537)..(707)
taccggtccggaattcccgggtcgacccacgcgtccgagttgttacaccatctaccctaattcctgaattccaaaaccttggagtcttctttgatttctttctcatgttctccacgttagtaggccctgctgctttccctcctcagtgtatgctaaactcatttaactttctccatttttactgacaatgcacaccatcatactctgtcatctatgccactgtaacacattcttaaatggtccctctgttcaactgttgcccctgcaattcattctatatgtagtggtgaaagtgaatacatataaacacaaatcaagttttgttacttgatggaaaccctccaataatcattcactatgaataaaatccagaccttttgctatgaccctcaagaccccatgtgacctggtccttgcctacctctctggccttggctctcacaattctgtctgtactgatattcaccagtcatattggttgtctcttttttcctaaattaagcactctaaactcatttctgcttcagagactgcagatgccatgctctgtgccggaaactctcttttcccttctctggttagctccttcccatcattcaggtttcagttcaaatgaggcttctctgaggactgatctattatttgccacagccattctttattctctatggcatcctccatattattttctttataatacttcttaatgtgtgaataattactgtgtggatgacttccttacatagttatttatttgttaatgttcttgcttacatttcattgtcagcttctagaagaagagctctttaagagcagtgaccctgtctgtcttgatcatggaacaaagactggtatatccagatgttcaataaatattttcctgtatgaatacatgactatgtttt

SEQ ID NO: 131 - DNA, 1069 bp, Homo sapiens
  CDS (141)..(308)
taccattgtccgcctgcaggtaccggtccggaattcccgggtcgacccacgcgtccgcccacgcgtccgaccatttgaacttgtaaagaacatgtgttctgcagtttttaggtgttctttatatattaagggggttgataatgttgttcacatcatttgtgtatgggctgatttttattttgtttgatttttattttctatcatttgttgaaagggatgttaaaatcttcaactgtaatggtgaaatagtattgtttccatttaattctgttcatttttgcctgatatgtctttatatacacatttaagattatgtcttcctgatgagttgtgaattagaacattatgaaatgttattctccgggaatattattctctccttacagtctattttactcaatattgatatagcaactccatcctttatatacttactgtttacatggtgtgccttttcagaagcatttactttcaattatagatagcatatagatgagacttgtttttttttaaatctattctgaaaatttctgattttattattaggaatatttaggggaaatgtttaataaattaatattttgggtttttctttctgccatttttcatatttatccctcctcctcccccaggaaaaattcaaaactcttttcttcaaactagtacgaaggataaaaatacgcttccccaccactcgtgggctcctctctcatcgtcaccctttcttacaactctcaaaccccccttacataatatcctctggaccctcaacctctcatgtgctgcaattcgccgacaactttctgtctcccgccatttcaccttccatctcctgccaacctgaagcctccgctcgctatcacttttgctatatcacctcttctcaacctacctactatacagtccagcttctcttcattaggtagattcttcaatatatactcctcgctaaacctacaccctagcgccctgaactactccccccgcatcccactccaagctccgcacctatcctctccacgactaatacgctatgaccacctccataacctcccgctctcgttattcc

SEQ ID NO: 132 - DNA, 1266 bp, Homo sapiens
  CDS (99)..(245)
cacgagagaaattgttggcaaattgtgaaatttattgttgtataatgctaatagatcagttgtcctgatgtctttgctgtaatgatttctttataaaaatgatcttaaatctgagctccctaactttagtttttgcctggaattacccattacatttgatgatatctctaaatgtcagttgtagctgttactctgatgatataagtggaatatacagaagcgtacttagacaaaagttaggttaatatctgaactacttcctccttgtgtatttaagagaatattgacttaagtttctagaatcctcaactaatcctaagtttattttctttgtctagaatactatgctgtttttgtttttggaaggaagagatataggcatagtttcctgctctcaaggagcttcaaaggctgtaccagtggggatgccattggtatttttagctggatagttgttattcagaaaagcaggacaagtaattatgattcctggtccgtacctggtaatgccagtaatgttaactctagctggttgttgacatctggtcatttagttggcaatctttcttttttttttttggcgtatggggaaaaggtttagagcttcaaagacggcccgggtaaagtcaacgcagggcctccacaggggtggcgttactccgggtttcccgcgctgagcgggttacagactgattttgtggcgcgaccgaggccgggccccggcagcggggattgcatcgcggcgcccgaccgggggggagctcgccacccgctgccgtccggaaccggggcacacccccgcggacgcacggagccggggctctcggggcccccccgccaggagccgcccaacacacgcgggcgcgacgtcacgcggggggccgacgccggcacgggtgggcgacgcgttattcggcgcgtcgcggccccgcgcgggcgctgcctcagtaccgggcgaccgcctccgcggcgactcctcccgctagctccccctctcgcgtacaccgacgcgcggaaagggcgggccgcgggcacctcatagtcgcgcacggcgtgaactgcgggaacaccgacaccgcgcggctggatagagcgaactcgccgagcactcgcgtgccggcggggcgagatatgcggtcagagggtctaagcgcgcgcgtgcgcgaaggggggcgggagtgccgcgggcttcgcgcgcgcccagccacctgccgtggggcgctattgtgcataggcgggggcgtatacccacgggcaaacgtggcc

SEQ ID NO: 133 - DNA, 495 bp, Homo sapiens
  CDS (129)..(344)
  misc_feature (1)...(495): n = a,t,c or g
tcctcgcaggtaccggtccggaattcccgggtcgacccacgcgtccgcccacgcgtccgaagaatggtttccttactaaatgagaaaagttgagccctttccactaaaatggttaaaataaaaacttcatgtgtttaattctggttatctggaaaattcactatgcagaacttataatgttaaataaacgagttgttaataaatgtagatcatgtcttatccaaaaatgcctatctacatgtcatagtacagtcattgttttatatcaatgcagagaggaagaagctgtgatgttaataaagttgaattttaaaatgaaaatccaaagaactatatgtatataggccaaataaaaagttacttgattacttaataatatggattaaaatgagtaatcactgtaattcatatattcaagaagttttcttttcaagttaacattttaagtcctgccatgccattccctgtccataaaaatccnnnnnaaaaaaaaaa

SEQ ID NO: 134 - DNA, 792 bp, Homo sapiens
  CDS (75)..(323)
tgcacctgcggtaccggtccggaattcccgggtcgacccacgcgtccgcttacatcagtttaaaatgagttaccatgaacaatatgaacttaaagagacttttactatttttggctaaaatgtttagcgcaatcttttccttacctactcatccttctcatttccccatttccatttatgacaacattggtcattggcctcagtcaccgaaagtcaggaggaaggaaggaaatgaatatttattgaaccccaatatgtgccagaccctggatttaacacttttagggataggagattatttaacctcaataacctctccctgagggcaggaagtggatttatagatgcggaaacagaggttctgcaaagtcaattgactttgcctggtaagaggcaaaaccagcatcctttatttaggcaatccaagtgatgttcatgtcctctggaacttaaatttttaaaacaaaaatttaaacagaaacatattacaaaagaacaactttatgcatgtgaccttttgggttctttaggaagccagctagccatctttattttaataactagaaggtgagacctttcctacaccatgtaattttaaggcgtctcatacttaaaaaataaatgaaacacctttttttttcctgcctcccttctagatcctacagcctgcccataacacccctggcaaccacccgtccccaccgcgcccacccacgcccattcccgtcctcaacctttcttagctgcccgctggcgccactcctcaccccccccacggccccaccccccctc

SEQ ID NO: 135 - DNA, 788 bp, Homo sapiens
  CDS (211)..(483)
gcctgcaggtaccggtccggaattcccgggtcgacccacgcgtccgcccacgcgtccgatttgttggagaaaagctgctattataaagcctgatgtggacttttttcatcagtgtcactcaagcaagttggcctttaaagacagttttttactgcttaatatataggagttttcttgttttatttgttcattttcctaattgaacaaattatggctcctcttcctagcctcactctaagaccttggtgtgtcctcatgttactggacctgtgggctgcatttggcacaattactccctccttgaagcactttcatcacctgccttccgggacacagcactccctggtttttgtcctgtctctgactcttcattctcagttgtctttgctgatgggcacctcagctgtctgtctttctgcctgtttttcttctctcagcactttccctgggtggttgcttatcatctgcacactgatgatttaaacatagagtttttgcctgtatctctccccctaagtctaggcttatatatctaactgcctgctcagtacctctatttggatgtttaataggcatttcaaattggaatccaaccttttgttcctacctctgcagccctggtccaaaacaccatcatctcttggccagcttattacacctgtagttaccttccatctggtcttcccacttccatactttgcccctccagcttgttattatagttgcgatagggatcgcttccacaatttgctcctgcctacctgtcatgataatcagactataccttt

SEQ ID NO: 136 - DNA, 774 bp, Homo sapiens
  CDS (400)..(534)
aattcccgggtcgacccacgcgtccggtaagcatgccccacactaagtataactaatatatagtaaaacttgcaatatagttagcataactagatatttatccctgttgggatttcacagttgcaccttgcctgttatttatattttcctaaattattagaagattttagaaaaagattctgtgttatgaatgcccaggtgagagttaattactgtatgcattttgacacctatgctgttaaaaagctgttgttgatagctgaaccaagaattggtctttgaccttctgggcacagttaatgagctactaatcttgtagggcatgtttctgttggacctctgcctgggctcattgtcagtatttattgacactcatccatgtatgcatggagggtttaaatgcagtcaagactggtgttctccagccaagctgttgctttcagcattcacaaaaacaaggtagaaaggagacctggacaacaagcacaggcacttggacttttaaaaattattttattttctgttttcccctgatatgataaatagtggtctaaagacctcagatttcctttattcatatatgggtttcctttttaaaaatattattttcagtggatttgcttatggacacatttattaccagttttattcaaaaattaaacatttgttcagcatttgtgtcctaagctgacaggtcttaaatcttatttttcaaagttatattggaagttatattagaagaagaaccggcttcctaggcccagacatatctgc

SEQ ID NO: 137 - DNA, 764 bp, Homo sapiens
  CDS (212)..(388)
ccggaattcccgggtcgacccacgcgtccgcccacgcgtccgcccacgcgtccgcccacgcgtccggggtttttataaaaatggattcagggtctgctgaaataaattttttttaaaaatttcagtccataaaccaaacaaaaatatctgtcctggaatgtgatcaggaacaaaccagaaaactgtgaacatctgatcttgatactggcttatgttgtctcttgttaagcttttgcttctttgcattattcatgaccattcaattaatttttgtatagccatacaggtaggattattaccaagtgcctaccgtgtaccaggaatagttctaagccttgagaatacagcactaataaggcagactccctgctcaaatagagccaactaatgaaaaatcgataaaatagagactaaagagagatccttagttgcgtttaaaatcttagtttttaacttccaggctggcacagtttgttaacaaaaaaaaaaaaaaggggggcccgttttaaagaatcaaattttacaaccgggggctggaaaggaattactttttttatagggcccccaaattcaatttccggggccgtgttttaacaaggggggactggggaaaaaatctggttgtcctccgtaacacctgcgataagacgatcgacggtaggtctatatcgacgaaccacccctccaacatctcacatcgttagaacgaggatatcttggacgccggctcgggggacacattgattagactatcccaactcatc

SEQ ID NO: 138 - DNA, 1126 bp, Homo sapiens
  CDS (144)..(707)
gatcccagcaggaaagacccgggagctgcgcgccagggaccagaacagcgaggagaagtcaccagaccagacctcacgggctccgctggctgcggtcgcctgggagctgccgccagggccaggaggggagcggcacctggaagatgcgcccattggctggtgctccagtccccaaaaggcaaaaatgtgaccactggactccctgcccatctgacacctatgcctacaggttactcagcggaggtggcagaagcaagtacgccaaaatctgctttgaggataacctacttatgggagaacagctgggaaatgttgccagaggaataaacattgccattgtcaactatgtaactgggaatgtgacagcaacacgatgttttgatatgtatgaaggcgataactctggaccgatgacaaagtttattcagagtgctgctccaaaatccctgctcttcatggtgacctatgacgacggaagcacaagactgaataacgatgccaagaatgccatagaagcacttggaagtaaagaaatcaggaacatgaaattcaggtctagctgggtatttattgcagcaaaaggcttggaactcccttccgaaattcagagagaaaagatcaaccactctgatgctaagaacaacagatattctggctggcctgcagagatccagatagaaggctgcatacccaaagaacgaagctgacactgcagggtcctgagtaaatgtgttctgtataaacaaatgcagctggaatcgctcaagaatcttatttttctaaatccaacagcccatatttgatgagtattttgggtttgttgtaaaccaatgaacatttgctagttgtatcaaatcttggtacgcagtatttttataccagtattttatgtagtgaagatgtcaattagcaggaaactaaaatgaatggaaattcttaaagggaatgatgtgattcaagctggaaagagggttgggagaaacagcttgtccaggtggagctatgttatgatcagatcgaagtgtgacccctgtgtggtccagacagccctgcagagagaaaacctttattcgattatcaccaagcacctcctagtttccgacagtcatctccttctgctgggaat

SEQ ID NO: 139 - DNA, 1897 bp, Homo sapiens
  CDS (534)..(1805)
cggcatctgcgtgctggggaccgacagtgtgggtgtgttaggaggatctgtatttagcacatttttgcctctggctaggacaggggggaaagggtggcgtggctacagcctgaccgatgggcaccgtcctaccctttgttctgtgcttccgagtgtcatacatgtgctggggtctgtgggcccatgactcagacggtgagctctgaccttcctgagccagggctttgctgtagttgtgcctggctcaagagctctaggacaaggggaccgctccaggtctgcatctacggtgtggcagggcccttcggcactcttgtgcactagtgtcatctttcccattgaaatgactgtgaggaccagaatgtgcacatgcagatgggcagctacttgtctgccttggccctttattacacaacttgctgggggtggagatgccaccccccggcagtcagagcccctttatgatgtcatggggctggttacatgactgccaaggggtgctgctggccacactgcactagcaagtttgccagatggaggacaagcgatcattgagtatggctcgctgtgaagaaagaaattcgagaggacaggatcatggcttggaaagggtgcctttccctccccagttgcagtcagagacctaccttcacccagcagatccttcccctgcctgggacgacccggggtccactgggagccctaacttgaggctgctgacagaagaaatcgctttccaacctctggccgaggaagcttcgttcagaaggccgcaccctgacggtgacgtcccgccccagggagaagataatctcctctccctcccctttccacagaaactgtggagactggtcagcagcaaccagttttcgtccatctggtgggatgacagtggggcttgtagagtgatcaatcaaaaactctttgaaaaggagattctcaaaagggacgtcgcacacaaagtgtttgccacaacttcgataaagagcttcttccgccagctaaacttgtatggcttccgaaaacggcgtcaatgcactttcaggaccttcacccgcattttctccgcaaaaaggctggtctccatcttgaataagttagagttctactgccatccttactttcaaagagactcccctcacctcctcgtgaggatgaagagaagagtgggtgtcaagtctgcaccaagacatcaggaggaggacaagccagaagctgctggatcctgtctggcaccagcagacactgagcaacaagatcacacgtctccgaatgagaatgaccaggtcacaccgcaacaccgggaaccggccggtcccaacacccaaatcaggagtggctctgctccaccagcaactcctgtgatggtgcctgattccgccgtggcgagtgacaacagtccagtgacccagccggccggcgagtggtcagagggcagccaggctcacgtcactccggtggccgctgtccctgggcctgcagcgctgcccttcctctatgtccctggatctcccactcagatgaattcttacgggcctgtggtggcccttcccacagcgtcccgtagtacccttgccatggacaccacaggacttcctgcacctggcatgctgcccttttgccatctctgggtaccggtgaccctagtggctgctggggctgcacagcctgctgcctccatggtcatgttcccccatctcccagctctgcaccaccattgcccccacagccaccgcacgtcacagtacatgccagctagcgatgggccccaggcgtacccagactacgcagaccagagcacatagagggcagcatttgggcagaatatgtgctggtcaataaatgtgtcagaaaatgagtaattttctgactgcacaaaaagtcttcatggtctcca

SEQ ID NO: 140 - DNA, 1156 bp, Homo sapiens
  CDS (150)..(584)
atttggccctcgaggccaagaattcggcacgagtgaaagcattagaagacaattgagtctgtcagaactgcaaaatattgctgagtgtggattgctctgaaatctgaaaacattacttgtgaattgcttctattcaaaatgcagacacaatgccaggtgttggtttacttgtttcccatttttcaaccctcgtttctaggcaaaggtgtccaaattatgcagacccacagaatctaacagatgtctctatattcctcctcctagaagtctcaggggatccagaactgcagccagtccttgctgggctgttcctgtccatgtgcctggtcacggtgctggggaacctgctcatcatcctggccatcagccctgactcccacctccacacccccatgtacttcttcctctccaacctgtccttgcctgacatcggtttcacctccaccacggtccccaagatgattgtggacatccagtctcacagcagagtcatctcctatgcaggctgcctgactcagatgtctctctttgccatttttggaggcatggaagagagacatgctcctgagtgtgatggcctatgactggtttgtagccatctgtcacccgctatatcattcaccatcatgaacccgtgtttctgtgcctttctagttttgttgtctttttttttctcagtcttttagactcccagctgcacaacttgattgccttacaagtgacctgcttcaaggatgtggaaattcctaatttcttctgtgacccttctcaactctcccatcttgcatgttgtgacaccttcaccaataagataatcatgtatttccctgctgccatatttggttttcttcccatctcagggacccttttctcttactctaaaattgtttcctccattctgagggtttcatcatcaggtgggaagtataaagccttctccacctgtgggtctcacctgtcagttgtttgctgagtttatggaacaggcgttggaggttacctcagttcagatgatgtgtcatcttcccccagaaagggtgcagtggcctcagtgatgtacacggtggtcacccccatgctgaaccccttcatctacagcctgagaaacagggatatgaaaagtgtcctgcggcggccgcatggcagcacagtctaa

SEQ ID NO: 141 - DNA, 2898 bp, Homo sapiens
  CDS (1074)..(2294)
agcacaccttccacagcactggtctctcctctcagaactgtgtttcccacacaggctcacgggctcccaaggggatacggctgcttgcggtgactgagctccctcctcacagcagagctgaggtctgggctccaggtccccagtggagtccctcgcagacagaaatagccgagaccatacaaccaaccaaatacacccctaacaagcttaagcgacaaatactcaaaaacataaaacccagtaaagaggaaacaccaccacctacacagacaccaaacgacggccacttccagttttcctgtgaagtctctgtgatgctcccctggagcagctgcagcacggagagaacaatccgccggacagctcgcaaaccccgacagcgcataaaccgcatcctgggctcgtggtcaaaacatcctgtagcaaggagggtcaatgcttacatgatgaagatgatgcagaaggacaggaaggccagggctgtggctccagctcccccgactgctgccagtgtcacttgtgatacagacctgccccccggggccccacagtgctcagttgaagggggtcccggggaccgcagcctccgcttccgctgctcgtggcccggcggggcccctgctgcctccctgcagttccagggtctccccgaaggcatccgcgccgggccagtgtcctctgtgctgctggcggccgtccccgcccacccccggctcagcggcgtccccatcacctgccttgctcgccacctggtggccacgcgtacctgcacagtcacgccggggaggcccctggctccaggaggcgggagtcgcctgcggctcagtcaagatgggcggaaactccacatcggcaacttcagcctggattgggacctgggaaattactccgtgctgtgcagtgggccgatgggtgctggcggtgaccagatcacctgcattgtgagaagggtctctagagtgcgattgcagcactattcttgcgccgaaaagagtcttgagacctcagtttctgagagaagaaccctgaggaacagacgttccctggcggccctggcgccttcaaacccagacatgctgctgctgctgctgctgctgcccctgctctgggggacaaaggggatggagggagacagacaatatggggatggttacttgctgcaagtgcaggagctggtgacggtgcaggagggcctgtgtgtccatgtgccctgctccttctcctacccccaggatggctggactgactctgacccagttcatggctactggttccgggcaggagacagaccataccaagacgctccagtggccacaaacaacccagacagagaagtgcaggcagagacccagggccgattccaactccttggggacatttggagcaacgactgctccctgagcatcagagacgccaggaagagggataaggggtcatatttctttcggctagagagaggaagcatgaaatggagttacaaatcacagttgaattacaaaactaagcagctgtctgtgtttgtgacagaccctccttggaacttgaccatgactgtcttccaaggagatgccacagcatccacagccctgggaaatggctcatctctttcagtccttgagggccagtctctgcgcctggtctgtgctgtcaacagcaatccccctgccaggctgagctggacccgggggagcctgaccctgtgcccctcacggtcctcaaaccctgggctgctggagctgcctcgagtgcacgtgagggatgaaggggaattcacctgccgagctcagaacgctcagggctcccagcacatttccctgagcctctccctgcagaatgagggcacaggcacctcaagacctgtatcacaagtgacactggcagcagtcgggggagctggagccacagccctggccttcctgtccttctgcatcatcttcatcatagtgaggtcctgcaggaagaaatcggcaaggccagcagcgggcgtgggggatacaggcatggaagatgcaaaggccatcaggggctcggcctctcagggacccctgactgaatcctggaaagatggcaaccccctgaagaagcctcccccagctgttgccccctcgtcaggggaggaaggagagctccattatgcaaccctcagcttccataaagtgaagcctcaggacccgcagggacaggaggccactgacagtgaatactcggagatcaagatccacaagcgagaaactgcagagactcaggcctgtttgaggaatcacaacccctccagcaaagaagtcagaggctgattctcacagaacaagaaccctctagagccccatgctatgcagtaggtcaccagggctccctcctcctgtctaaccaaaacttggaccaatgtctcccctttccccggctaccagggacccatccctgcctctagcttctactacccaccattctcctctcgacctctctgaggttgactattttagattccacatagagatgaggtcatgtggtacttgcctctctgtgtgtggctcattttacacaaaaaaatatcccctaggttcatccatgttctctcaaatgacagaatcaagcactgaatatttttttttctttgagagatggagtttcgctctgttgcccaggctggagtgcagtggttcaatctctgctcactgcaacctccacctcctgggttcaaacgattctcctgcctcagcttcccaagtagctggtactacaggcgtgtgtcaccacgcccagctaatttttgtattttttagtagagacggggtttcactataagtgggccaggctagtctcaaactcctgacctcaagtgatctgcctgccttggcctcccaaagtgctgggatttcaggcatgagccaccgcacccag

SEQ ID NO: 142 - DNA, 478 bp, Homo sapiens
  CDS (138)..(356)
ataccgctccggaattcccgggtcgacccacgcgtccgtactactcagaagaaatcagagttaatattttagtgtaaattttttatctatgaagtaaacaattttaaaagctaaatatagagtctcatttagaaaatatgtattataccttgtgtaattttgtattctttacacttcacatgatattgtttcccaagtcattaaatattcttctaagtaaccagattagatcagcaatagttcacttaaaacagcgaacaagctgcattaaaaaccagccagagccttaccaaagagctgatgctatgaataccaatcatagcttagttgctgttccatatgttaatttaatttgacagagtaagagtctttgaagtcctaattctcttttgcatccaataaaccagtttttatagtgcgtgaacttttagacatcagcctgcagctaaactcatgtcgggaagttgccatgaggtca

SEQ ID NO: 143 - DNA, 1322 bp, Homo sapiens
  CDS (328)..(549)
  misc_feature (1)...(1322): n = a,t,c or g
aacggtcgacgatatcgttctgtgtgtcagccttcctggaaggcacttaaatgagttcacagaaggcaaagtgaaggacatacgtaggtgactcgagtgtccaccatcgacctgttctgcaacccagctgtcaaaatcctgccccaagctctttgacataagggtacttctggtagaatttttttaaaacttaattacttcctgcaggcttcagaatgtttgagcatgaaaacaaatggaagcaggcttactttcgatgtcttattaaggtctttaccatgatcaatgttacctttatgacaagcttcatatgccttgttaggcagaatgttttggatggtaaaaatcctgactcccaaagcatcaacattccaagtaactacttcagtttcagttccgctcaccagtgctacaggagcagcgtgcagcgggtcctgcttccattcgactggctgtgcaggacggccacaaacacacgcaggtgcaccctgcgcttctgagcagaactctcggaatgaagtaatgcagacgtccacaaatgagatgtgatttcactgagggaggctgatttttagcagttgttccttttttaacagatagtctataagtggaaactgacctgaaacattcagctctaaagaaataatcacaaagcacctcggtgcctgatttttgcaaggcagtccttgccggaggatcgggcattcgtgcacattcacccggagaccgtgctgtccacttccagaaggggaggaagggcagcgctcagaagcacgcccagactgtctccagccctgctgccccctgctgaggccatctcgcctgctcagcccccaagttcccccacagtccatgtccctgggttatgaatgtcacctggtgtctgtcagatccccaccccattgttcttgtcaatgagcaggagtggggtggacctgccatcctgcgaatcctttacagcctgcagcgctgcctgccaactcttcacaaccattagcacccactaacaatccatttcccctggagctcttcactctaaagatagaagaccaaaaaatagaagtgtcctcatttctcacagtactacaggaggaggtgagaaccgatgcatccgtgcatcttaggagaatctcatttcagacctcggctttgagtgcgcctcctgctcagtcagccctctccctcgctgcaggttgacgtgggtcaggacagtgcgcagtcaggcagccttgattttcggttctggggtttggtccaaggattgaccgggttccnttttgttcattgccccttcntgttgcaacccctgggtttgttttggc

SEQ ID NO: 144 - DNA, 672 bp, Homo sapiens
  CDS (224)..(502)
aagctggtacgcctgcaggtaccggtccggaattcccgggtcgacccacgcgtccggctgcctccacccgaggggtcctgagccctatcctggtttgttgccggacccccaagagcattccaagcaaatcaacactgacacattcatgatctaatgctcagattcattcagctttctctgactctccgctgatgcccttcatgcctaagcatgctcccggtccatgcactgcagacagttaaaggaagtgctgcagcttcctttaacctgcagcagctgctgtgtctgtaccatgaccgtggcatttcccagcgtccagcaggtgtggatggagactgtgctgactctgggtgggcttgatgctgctcaggatgagatccaggcggtgaggctcattctcctccctgagtcctctcctcaggggccacatgggaacctggctccctgttctgcaaagcccttcttccttccccaagtcatgcccttgggcacagccccttagggctaggggccttcaccctcaggcaggctgacccacccctgcaggccaggatggctgagtccctgctggggtggagcacgcctgggcctgcctctacgaaccgaagcacaggttagacctcaggcccgatgaagaccggcgttaccccggcacaaccaaaaggacgcccc

SEQ ID NO: 145 - DNA, 1229 bp, Homo sapiens
  CDS (103)..(903)
tcgcctgcggtaccggtccggaattcccgggtcgacccacgcgtccgcggacgcgtgggcttgcctgctgctctggcccctggtcctgtcctgttctccagcatggtgtgtctgaggctccctggaggctcctgcatggcagttctgacagtgacactgatggtgctgagctccccactggctttggctggggacaccagaccacgtttcttggagtactctacgtctgagtgtcatttcttcaatgggacggagcgggtgcggttcctggacagatacttctataaccaggaggagtacgtgcgcttcgacagcgacgtgggggagttccgggcggtgacggagctggggcggcctgatgcggagtactggaacagccagaaggacctcctggagcagaagcggggccgggtggacaactactgcagacacaactacggggttgtggagagcttcacagtgcagcggcgagtccatcctaaggtgactgtgtatccttcaaagacccagcccctgcagcaccacaacctgctggtctgttctgtgagtggtttctatccaggcagcattgaagtcaggtggttccggaatggccaggaagagaagactggggtggtgtccacaggcctgatccacaatggagactggaccttccagaccctggtgatgctggaaacagttcctcggagtggagaggtttacacctgccaagtggagcacccaagcgtgacaagccctctcacagtggaatggagagcacggtctgaatctgcacagagcaagatgctgagtggagtcgggggctttgtgctgggcctgctcttccttggggccgggctgttcatctacttcaggaatcagaaaggacactctggacttcagccaagaggattcctgagctgaagtgcagatgacacattcaaagaagaactttctgccccagctttgcaggatgaaaagctttccctcctgggctgttattcttccacaagagagggctttctcaggacctggttgctactggttcagcaactgcagaaaatgtcctcccttgtggcttcctcagctcctgttcttggcctgaagccccacagctttgatggcagcgcctcatcttcaacttttgtgctcccctttgcctaaaccctatggcctcctgtgcatctgtactcaccctgtaccacaaacacattacattattaaatgtttctcaaagatggagttaaaaa

SEQ ID NO: 146 - DNA, 1651 bp, Homo sapiens
  CDS (54)..(1031)
ggtcgacccacgcgtccgatttgaagaagtgttttcatctatccaagaaaaatatgatgtctccatcccaagcctcactcttattcttaaatgtatgtatttttatttgtggagaagttgtacaaggtaactgtgtacatcattctacggactcttcagtagttaacattgtagaagatggatctaatgcaaaagatgaaagtaaaagtaatgatactgtttgtaaggaagactgtgaggaatcatgtgatgttaaaactaaaattacacgagaagaaaaacatttcatgtgtagaaatttgcaaaattctattgtttcctacacaagaagtaccaaaaaactactaaggaatatgatggatgagcaacaagcttccttggattatttatctaatcaggttaacgagctcatgaatagagttctccttttgactacagaagtttttagaaaacagctggatccttttcctcacagacctgttcagtcacatggtttagattgcactgatattaaggataccattggctctgtcaccaaaacaccgagtggtttatacataattcacccagaaggatctagctacccatttgaggtaatgtgtgacatggattacagaggaggtggatggactgtgatacagaaaagaattgatgggataattgatttccagaggttgtggtgtgattatctggatggatttggagatcttctaggtgatgcattccggggtctcaaaaaagaagataatcaaaatgcaatgccttttagcacatcagatgttgataatgatgggtgtcgccctgcatgcctggtcaatggtcagtctgtgaagagctgcagtcacctccataacaagaccggctggtggtttaacgagtgtggtctagcaaatctaaatggcattcatcacttctctggaaaattgcttgcaactggaattcaatggggcacgtggaccaaaaacaactcacctgtcaagattaaatctgtttcaatgaaaattagaagaatgtacaatccatattttaaataatctcatttaacattgtaatgcaagttctacaatgataatatattaaagatttttaaaagtttatcttttcacttagtgtttcaaacatattaggcaaaatttaactgtagatggcatttagatgttatgagtttaattagaaaacttcaattttgtagtattctataaaagaaaacatggcttattgtatgtttttacttctgactatattaacaatatacaatgaaatttgtttcaagtgaactacaacttgtcttcctaaaatttatagtgattttaaaggattttgccttttctttgaagcatttttaaaccataatatgttgtaaggaaaattgaagggaatattttacttatttttatactttatatgattatataatctacagataatttctactgaagacagttacaataaataactttatgcagattaatatataagctacacatgatgtaaaaaccttactatttctaggtgatgccataccattttaaaagtagtaagagtttgctgcccaaatagtttttcttgttttcatatctaatcatggttaactattttgttattgtttgtaataaatatatgtacttttaaaaaaaacagaaaaaaaaaa

SEQ ID NO: 147 - DNA, 737 bp, Homo sapiens
  CDS (124)..(336)
agcgtggtggaattcctcagccaagatgaagcatgccttttcaaaaagaacaccccaaaataagtattttaccattatctaaaagactacttttgctgggttttattttttaatctattgaacatgagaacatggtcaaaagtcataccttccttatggttgaaattttctagaggttttataatattgagatttcattttttaatgataatttggcctgacataccttccagtatgtacatttgtatgagttttatcacagcatttaaaaatctctttatgtttggaattaataggattaaaaaaatctcagtagtttctagaaatactttatagtgacagttttgttttttagtcttccagattgttgatattaatgcaaacaatattaagcttatatcacaaaaatattttcagtaaagcgtattttttataaactgtgttaggcactgggaataatacaaaaatgataaataaagcctgtcccttgcctgatgtcacagtcgggctacagctgccagaaacaaggccagcaaaattaggatacagcttgcgaatgtagtgtgaagaaaggccttcggaataccaaagaaaattctagggtcagggaaagctttgaagagaaggtgatgttcagctatgtttgaagaatggggagggctcatcagcgatagaacattctagataggtttggaagcatgagagcatggagcaattgggaaaacccaatatgcccg

SEQ ID NO: 148 - DNA, 1255 bp, Homo sapiens
  CDS (3)..(1217)
ccatggctagctcggggccggccatgcttcgcggtccgtggcgctttttttggctctttctcctgctgctgctcccgggcgcgcccgacccacgcgtccgctccaggccgtgggagggaaccgacgagccgggctcggcctgggcctggccgggcttccagcgcctgcaggagcagctcagggcggcgggtgccctctccaagcggtactggacgctcttcagctgccaggtgtggcccgacgactgtgacgaggacgaggaggcagccacggggcccctgggctggcgccttcctctgttgggccagcggtacctggacctcctgaccacgtggtactgcagcttcaaagactgctgccctagaggggattgcagaatctccaacaactttacaggcttagagtgggacctgaatgtgcggctgcatggccagcatttggtccagcagctggtcctaagaacagtgaggggctacttagagacgccccagccagaaaaggcccttgctctgtcgttccacggctggtctggcacaggcaagaacttcgtggcacggatgctggtggagaacctgtatcgggacgggctgatgagtgactgtgtcaggatgttcatcgccacgttccactttcctcaccccaaatatgtggacctgtacaaggagcagctgatgagccagatccgggagacgcagcagctctgccaccagaccctgttcatcttcgatgaagcggagaagctgcacccagggctgctggaggtccttgggccacacttagaacgccgggcccctgagggccacagggctgagtctccatggactatctttctgtttctcagtaatctcaggggcgatataatcaatgaggtggtcctaaagttgctcaaggctggatggtcccgggaagaaattacgatggaacacctggagccccacctccaggcggagattgtggagaccatagacaatggctttggccacagccgtcttgtgaaggaaaacctgattgactacttcatccccttcctgcctttggagtaccgtcacgtgaggctgtgtgcacgggatgccttcctgagccaggagctcctgtataaagaagagacactggatgaaatagcccagatgatggtgtatgtccccaaggaggaacaactcttttcttcccagggctgcaagtctatttcccagaggattaactacttcctgtcatgaaggctagaggaagacttcctggaactgcctttcttcca

SEQ ID NO: 149 - DNA, 474 bp, Homo sapiens
  CDS (293)..(409)
gccaggccgcgaattcccgggtcgacccacgcgtccggggaaattaaaagatttaattgttaaatgtaagttgggaaattaaaagtctgtgtaattagtcctgtttttgccacctgtgataaaataataaggcttctatttatctaagaagacccgggcatacacaacagtggtttttaaaaatttaccgtcaacttgaagtattttcctttctcttccatgaagagcagtaacattttttctcttttcttatttttagtaacttttatcttcctgacttccatagccagcatcttattttcttcttggtgtcctttttcccttatcaaatgtaaccaggatctttattatagtggaaatggggccagttgatgaagtctaatatgaaacgaatattttaactttcaaatgcagaagagctaagttgcaaagatagcagaactgtccaatctgtctaccttcacagcagtgctg

SEQ ID NO: 150 - DNA, 836 bp, Homo sapiens
  CDS (73)..(210)
gaccggtccggaattcccgggtcgacccacgcgtccgggaatcttgttaagggttggctgggatacatttatatgctttgcagtctcttccatatattaatagttacattattgctggccatctcatttgggatgtcttctaggaatactctgaatatggtcaattcaaagattaaagagcattcactccatagaaaacttgaaatatgaaatcttatagctcagatatgaaggaaacttagcagtttccccagatttgacaattctaaaaattacatggtgctactaatacatagttgaggatgtaaaagaagcctctataaactgccaaaaagaaaaataaaaagggattttccattaaaaatgtatgtgctatgtaattttaaatgagatcatgccattatatagattttttttttttggacggagttttgctcctgttgcccaggctggagtgtaatggggccatctcggcttgctgcaacctccacctcctgggttcaagcgattctccagcctcagcctcccaagtggctgagattgcaggcaccgccaccacccccgcaaaattttggaattttaagaagatagggggttccacattttggcccggctgggtctaaacttcctgatccaccaacttaaccctccaaagggcgtggataacagggggagccacccgccctgccagaatatgaatttttaaatggatgtttggaggcacactacatatttcctagactacttccgatatttttttacggggaacctatattttacccattggaaataaaaaaaaaatattttattttaaaaaggaggattggcccctgggc

SEQ ID NO: 151 - DNA, 871 bp, Homo sapiens
  CDS (33)..(242)
ccatcgattacgccaagcttggcacgaggattatgttttggaccctggttcaggggatgtccttactgtgtctaactgatgtgtttcaggctcttccttcaatatgtattgcgaatagtgagatttattacacagtcctaacattgatgcagtttagttgcttgtggatggtgttgtcaggaaaaaaggtaatattttcttctgaactcatggttagaaagggcaggagaagctggaagtaagatatcctccatcctccttagacatatttacatcacctcttccaggtttgcatattgcttacaatcaatacagagaagagaaaacaaaggaaatatgtgataagttgataaattactgctacaaaatttaaattctggccctaaagcaataacaaagtagaacatagtgaaacaagtacacaaaagatttaaaactggggatacagaagttccaaagcaaggagaaaaaaggaaattattataactggacttaaaattcaaaaaaatggtatttagaactaagaaattaatttgagtgaaattaatgttagaataaaaataaaattgaaatcaacatgagggaagagtctaaagcatgcatatatgattgaaagagcaagacaactcacaggaaaagctaaaaatcaagtagaagcaagattttgactggaaagaagcagcacgagtgaatggatggaaatgaaaaaaagatctacagagatatccactgcaagaggagttttcatcgccagggcaccagcttctccagttaccttcccctgtaagtgggaccacaggcccttcctgtggaagagccctcagtgactaaacagcatactctggcttttctcatttcttccttaggggcg

SEQ ID NO: 152 - DNA, 650 bp, Homo sapiens
  CDS (238)..(381)
cgtccggaattcccgggtcgacccacgcgtccggttagacctaaggtgatatgagaatataatgtatgtccatcaagaaaaggatatatttgttgagtaaactttaaaattaggaaggggatcatctatgatacattaacatatatctgatgatacattagctgatgatatatgctatgatatattagcatattctaattagcatatatcatcagcatatatgggaatgtcattggcatgtatttgaagcccttaatatacttttctattttgatatttttgagtcaaaggagtaaattatcccttccctacaatgttcacaattgtatgaatataggtgaagataggcgaccccagaaagtacagctgcttcagttgtactaataagtaatcatcatcctgcaagaagtatgttgtgacttctcctacaattaactatcatatagtttaatatatgtttaatattattataaaaagtagaaaaataaaatttatttagaagcaaggattagattgcaataattattatatttataatttctagcatgtttgggggggggaccatttgaggttcctaaaccaatggggcgggttttttaaaaaccaaaaccttcccacaaaaatttttaggctttaaccttaaaaaaggc

SEQ ID NO: 153 - DNA, 518 bp, Homo sapiens
  CDS (347)..(496)
aacattgcggaaccgccccggaatttccgggtcgacccacgcgtccggcccgcctgggcctcctaaagtgcttggattacagttgtgagccaccacgcccggccgactattttctcttatttcaaaattacatattcttatacactatggaacttggaaaataagggaaagcataaagaaaatttaaatcacccataatttcacaaaccagagatgaaaccactgctaacagttgctgtaatttcttccagtctcttttctacagtgagatctgtatttctagctggctacacatagtataaatctaggtttagaatcaagtagaaatagctctaaagtgctgccgatgctgccattggctctgatagtggatctcatttatccctgggtccaggtgagaggtcctgaggacccaaatcatgggacaacagagagaaaaagagaagaggtgacctgcctaggggcggcccggctgagtttggaagccgcaaggtgaactccctccatgggagaaagct

SEQ ID NO: 154 - DNA, 1016 bp, Homo sapiens
  CDS (169)..(879)
gaaactgcaagagtggggcagagaaccagagtgtcagagcaaaacctcctctatctgcacatcctggggacgaaccgggcagccggagagctgcggccggcccagtcccgctccgcctttgaagggtaaaacccaaggcggggccttggttctggcagaagggacgctatgaccgcagaattcctctccctgctttgcctcgggctgtgtctgggctacgaagatgagaaaaagaatgagaaaccgcccaagccctccctccacgcctggcccagctcggtggttgaagctgagagcaatgtgaccctgaagtgtcaggctcattcccagaatgtgacatttgtgctgcgcaaggtgaacgactctgggtacaagcaggaacagagctcggcagaaaacgaagctgaattccccttcacggacctgaagcctaaggatgctgggaggtacttttgtgcctacaagacaacagcctcccatgagtggtcagaaagcagtgaacacttgcagctggtggtcacagataaacacgatgaacttgaagctccctcaatgaaaacagacaccagaaccatatttgtcgccatcttcagctgcatctccatccttctcctcttcctctcagtcttcatcatctacagatgcagccagcacagttcatcatctgaggaatccaccaagagaaccagccattccaaacttccggagcaggaggctgccgaggcagatttatccaatatggaaagggtatctctctcgacggcagacccccaaggagtgacctatgctgagctaagcaccagcgccctgtttgaggcagcttcagaccccacccaggagcccccaggatttcatgaatatgcggcactgaaagtgtagcaaaaagacagccctggccactaaaggaggggggatcgtgctggccaaggttatcggaaatctggagatgcagatactgtgtttccttgctcttcgtccatatcaataaaattaagtttctcgtcttaaaaaaaaaa

SEQ ID NO: 155 - DNA, 1414 bp, Homo sapiens
  CDS (114)..(1028)
tttcgtgaggaagttcaagggcgagagtgagtaccagcagaaggctgggagtctgtagtttgttcctgctgccaggctccactgaggggaacggggacctgtctgaagagaagatgcccctgctgacactctacctgctcctcttctggctctcaggctactccattgtcactcaaatcaccggtccaacaacagtgaatggcttggagcggggctccttgaccgtgcagtgtgtttacagatcaggctgggagacctacttgaagtggtggtgtcgaggagctatttggcgtgactgcaagatccttgttaaaaccagtgggtcagagcaggaggtgaagagggaccgggtgtccatcaaggacaatcagaaaaaccgcacgttcactgtgaccatggaggatctcatgaaaactgatgctgacacttactggtgtggaattgagaaaactggaaatgaccttggggtcacagttcaagtgaccattgacccagcgtcgactcctgcccccaccacgcctacctccactacgtttacagcaccagtcacccaagaagaaactagcagctccccaactctgaccggccaccacttggacaacaggcacaagctcctgaagctcagtgtcctcctgcccctcatcttcaccatattgctgctgcttttggtggccgcctcactcttggcttggaggatgatgaagtaccagcagaaagcagccgggatgtccccagagcaggtactgcagcccctggagggcgacctctgctatgcagacctgaccctgcagctggccggaacctccccgcgaaaggctaccacgaagctttcctctgcccaggttgaccaggtggaagtggaatatgtcaccatggcttccttgccgaaggaggacatttcctatgcatctctgaccttgggtgctgaggatcaggaaccgacctactgcaacatgggccacctcagtagccacctccccggcaggggccctgaggagcccacggaatacagcaccatcagcaggccttagcctgcactccaggctccttcttggaccccaggctgtgagcacactcctgcctcatcgaccgtctgccccctgctcccctcatcaggaccaacccggggactggtgcctctgcctgatcagccagcattgcccctagctctgggttgggcttggggccaagtctcagggggcttctaggagttggggttttctaaacgtcccctcctctcctacatagttgaggagggggctagggatatgctctggggctttcatgggaatgatgaagatgataatgagaaaaatgttatcattattatcatgaagtaccattatcataatacaatgaacctttatttattgcctaccacatgttatgggctgaataatggcccccaaagata

SEQ ID NO: 156 - DNA, 842 bp, Homo sapiens
  CDS (85)..(456)
ctcggtaccggcccgcaattcccggttcgacgggaggcacgaggggagtctcactaaaccttccttggctggagtcagccatacatgaggattagttgcccttggtgcttgtggaatctctccttggaagtgggaggcactgtggcgaccactgcccagcagcacatagcagaggtgtgcagaagcagccaggcagggagaggttttctccactgtttgcacccagcactgggcacttctggatgccaccctgttccttgcagcagctccctggtgggctttggatggaggggctactcaggagaagccagctgggggagggccagcagccggccagcagcccccactcctcccatgccagccaacgtacaggccggatgggaacagtctgtgaggcttttgtgccactcctggctgcgcttggcagctctgcatgtcacacatgaggaatcctgagtctcaaaatggcccaggaatccagcatgagctgtgctaggagtcaagaggtttgccacgactgggcttggttccttgttcatgagcgagcacgtccctcagtctatccatctagctggtgacgtttcctgaacaccaggggagaccaggctctgttctaggcacgggcagcagtgaggaagactgcacggcccctgaagctagtgctgggggacagggttggggtggcatggccctcatcaccagccgcctgcgagtctgtgccagagcagattggggtgacaacagactgcactgtgtggggtgaggggcagcatgtggctggcccccaaatgaggggagatatggttagggaggcaccttggcctgttggcaatgggtgggaa

SEQ ID NO: 157 - DNA, 877 bp, Homo sapiens
  CDS (391)..(528)
agtgcccctgatcacccaagttggccagagaccctggtgtggggctgattctgtctggatatacggggaggggtaagcatgaggaaaggaagcaggtcctgacaggtactttgcactaaacagctccttataaggttctcaatttgcctgctcaatttctacagacatttgtgggaccacaccagtacattgtaaaagcaggaaacaattgagaaaaacctgagttttatgttggtaggagaaatgcctatggaatatggcaaatcgtttctctgagacttcctccctagtaattacatatttgttctcaaaaacaaatgccagaaggaagaagcagatttaatagtgcattttacaaggcaccattaatctctaagaagaacaattaaaatgtctcagcaatcatggttcactgtatatcttttctatcttcttagaagtaatatatggctggaaatgggcataccaaaatatgtcaaggaagtggaattgcgttcattagatttcaccagtaattattttagttagcttcacagatctctcttccttgcttgttcttgagagcgaggctttttagtaggaagagaaattgtctaaaacgattaataaccacaaattcaccaaactattttgggtaagtccctctatttctctaggtctaaagctaggaataagagtcattctcatataatgtactgtcccagaaagggcattatattagtctgttttcacgctgctgataaagacatatccgggattgggtgatgtatttaaaaaaagaggtttaatggactcacagttccacatgcctggggaggcttcacaatcatggaggaaggtgaaaggcacatcttacatggtggcagacaagacagaa

SEQ ID NO: 158 - DNA, 793 bp, Homo sapiens
  CDS (49)..(759)
aattccttgttcgacgatttcgccacgactgaacagagaggactcaacatggagtttgggctgagctgcattttccttgctgctattttaaaaggtgtccagtgtgaggtgcagctggtggagtctggcggaggcttggtaaagccgggggggtctcttaggctctcctgtgcagcctctggattcagtttcagtaaagcctacatgaactgggtccgccaggctccagggaaggggctggagtgggttggccgcattaaaactaagaaagatgctgggacaacagactacgctgcacccgtgaaaggcagattcaccatctcaagagatgattcagaaaatacgttacatctgcaactgaacagcctgaaaaccgaagacacaggcatatattattgttgtacagaccccacctggtacgcggctgtgggtggctcctactggggccagggaaccctggtcaccgtctcctcagcctccaccaagggcccatcggtcttccccctggcaccctcctccaagagcacctctgggggcacagcggccctgggctgcctggtcaaggactacttccccgaaccggtgacggtgtcgtggaactcaggcgccctgaccagcggcgtgcacaccttcccggctgtcctacagtcctcaggactctactccctcagcagcgtggtgaccgtgccctccagcagcttgggcacccagacctacatctgcaacgtgaatcacaagcctgtattgcgggcgctctagaggatcaagcttacgtacgcgtgataggcctatc

SEQ ID NO: 159 - DNA, 1644 bp, Homo sapiens
  CDS (66)..(1499)
agcccagcactagaagtcggcggtgtttccattcggtgatcagcactgaacacagaggactcaccatggagtttgggctgagctgggttttcctcgttgctcttttaagaggtgtccagtgtcaggtgcagctggtggagtctgggggaggcgtggtccagcctgggaggtccctgagactctcctgtgcagcgtctggattcaccttcagtaattatggcatgcactgggtccgccaggctccaggcaaggggctggagtgggtggcagctatatggtatgatggaagtaataaatactatgcagactccgtgaagggccgattcaccatctccagagacaattccaagaacacgttgtatatgcaaatgaacagcctgagagccgaggacacggctgtgtattattgtgcgagagagggtcggtgggtacgatatactacggtgactactatcggatactactttgactactggggccagggaaccctggtcaccgtctcctcagcctccaccaagggcccatcggtcttccccctggcaccctcctccaagagcacctctgggggcacagcggccctgggctgcctggtcaaggactacttccccgaaccggtgacggtgtcgtggaactcaggcgccctgaccagcggcgtgcacaccttcccggctgtcctacagtcctcaggactctactccctcagcagcgtggtgaccgtgccctccagcagcttgggcacccagacctacatctgcaacgtgaatcacaagcccagcaacaccaaggtggacaagagagttgagcccaaatcttgtgacaaaactcacacatgcccaccgtgcccagcacctgaactcctggggggaccgtcagtcttcctcttccccccaaaacccaaggacaccctcatgatctcccggacccctgaggtcacatgcgtggtggtggacgtgagccacgaagaccctgaggtcaagttcaactggtacgtggacggcgtggaggtgcataatgccaagacaaagccgcgggaggagcagtacaacagcacgtaccgtgtggtcagcgtcctcaccgtcctgcaccaggactggctgaatggcaaggagtacaagtgcaaggtctccaacaaagccctcccagcccccatcgagaaaaccatctccaaagccaaagggcagccccgagaaccacaggtgtacaccctgcccccatcccgggaggagatgaccaagaaccaggtcagcctgacctgcctggtcaaaggcttctatcccagcgacatcgccgtggagtgggagagcaatgggcagccggagaacaactacaagaccacgcctcccgtgctggactccgacggctccttcttcctctatagcaagctcaccgtggacaagagcaggtggcagcaggggaacgtcttctcatgctccgtgatgcatgaggctctgcacaaccactacacgcagaagagcctctccctgtccccgggtaaatgagtgcgacggccggcaagcccccgctccccgggctctcgcggtcgcacgaggatgcttggcacgtaccccgtctacatacttcccaggcacccagcatggaaataaagcacccaccactgccctgggcccctgcgaaaaaaaaaaa

SEQ ID NO: 160 - DNA, 1093 bp, Homo sapiens
  CDS (1)..(876)
  misc_feature (1)...(1093): n = a,t,c or g
atggccatgctcctgggggcatcagtgctgattctgtggcttcagccagactgggtaaacagtcaacagaagaatgatgaccagcaagttaagcaaaattcaccatccctgagcgtccaggaaggaagaatttctattctgaactgtgactatactaacagcatgtttgattatttcctatggtacaaaaaataccctgctgaaggtcctacattcctgatatctataagttccattaaggataaaaatgaagatggaagattcactgttttcttaaacaaaagtgccaagcagttctctctgcacattgtgccctcccagcctggagactctgcagtgtacttctgtgcagcaagcagccccttttcgtattcaggaggaggtgctgacggactcacctttggcaaagggactcatctaatcatccagccctatatccagaaccctgaccctgccgtgtaccagctgagagactctaaatccagtgacaagtctgtctgcctattcaccgattttgattctcaaacaaatgtgtcacaaagtaaggattctgatgtgtatatcacagacaaaactgtgctagacatgaggtctatggacttcaagagcaacagtgctgtggcctggagcaacaaatctgactttgcatgtgcaaacgccttcaacaacagcattattccagaagacaccttcttccccagcccagaaagttcctgtgatgtcaagctggtcgagaaaagctttgaaacagatacgaacctaaactttcaaaacctgtcagtgattgggttccgaatcctcctcctgaaagtggccgggtttaatctgctcatgacgctgcggctgtgggtccagctgagatctgcaagattgtaaggacagcctgtgctccctcgctccttcctctggcattgcccctcttctccctctccaaacagagggggaacttcttccttacccccaagggagggtgaaagctggcttacccacttttgtggccccccccgggcaattgccacccaattgggttccttaccccgantttatggnttaagggnttgttggaagaggttgnccaaacattggttggcca

SEQ ID NO: 161 - DNA, 683 bp, Homo sapiens
  CDS (179)..(322)
ctactcgcctccggaattcccgggtcgacgatttcgtatatatttctaatgattgggctttagctttaaaaacattaggctagatgcctccctattttttgtggcatgatttagctgtaactagcctggaggcaataacaatactaaatgaccttttgtagtcacattaaacattgaaatggtactgagactgccttggtggggagttttggcctatgggaatgatgtgggttttggtttctactcctttctctgttatcagataaatcctcctacatgtcccattctctggctctgggaagtactgacagtagggaaaagttagtacactcatctcattgttcagatcaagtttcctgggtgcggttttgcaaaactttctacaagagctgactcaagagttctcttctattgtggagatgatcctgctcttatatgtcatactaatttatatccttgaaactgtgagcagcatcatttgcatgtgttaagttgggaatgaataaagtgaaaatattttcacacattccttgagaaaagggttccttttgctgtgcaaatcaacgctccctagatgctgtggctaaaaagtgaagaattctaggccaacatttttttacccctttcattttctttactttgttttttttagaagaggtgcgaggtcctgggccccagaggta

SEQ ID NO: 162 - DNA, 1833 bp, Homo sapiens
  CDS (143)..(1252)
gaattcccgggtcgacgatttcgtcaggagggagaaggaggagccagcggaaggacggtgtgcgggccggccagccctggacgaaagaagagggcccctccaggccagtctgggcaccctgggatagcggctgcagccaggcatggccgactctgcacaggcccagaagctggtgtacctggtcacagggggctgtggcttcctgggagagcacgtggtgcgaatgctgctgcagcgggagccccggctcggggagctgcgggtctttgaccaacacctgggtccctggctggaggagctgaagacagggcctgtgagggtgactgccatccagggggacgtgacccaggcccatgaggtggcagcagctgtggccggagcccatgtggtcatccacacggctgggctggtagacgtgtttggcagggccagtcccaagaccatccatgaggtcaacgtgcagggtacccggaacgtgatcgaggcttgtgtgcagaccggaacacggttcctggtctacaccagcagcatggaagttgtggggcctaacaccaaaggtcaccccttctacaggggcaacgaagacaccccatacgaagcagtgcacaggcacccctatccttgcagcaaggccctggccgagtggctggtcctggaggccaacgggaggaaggtccgtggggggctgcccctggtgacgtgtgcccttcgtcccacgggcatctacggtgaaggccaccagatcatgagggacttctaccgccagggcctgcgcctgggaggttggctcttccgggccatcccggcctctgtggagcatggccgggtctatgtgggcaatgttgcctggatgcacgtgctggcagcccgggagctggagcagcgggcagccctgatgggcggccaggtatacttctgctacgatggatcaccctacaggagctacgaggatttcaacatggagttcctgggcccctgcggactgcggctggtgggcgcccgcccattgctgccctactggctgctggtgttcctggctgccctcaatgccctgctgcagtggctgctgcggccactggtgctctacgcacccctgctgaacccctacacgctggccgtggccaacaccaccttcaccgtcagcaccgacaaggctcagcgccatttcggctatgagcccctgttctcgtgggaggatagccggacccgcaccattctctgggtacaggccgctacgggttcagcccagtgacggtggggctggggcctggaggcccagatacagcacatccacccaggtcccgagccctcacaccctggacgggaagggacagctgcattccagagcaggaggcagggctctggggccagaatggctgtccttgtcgtagagccctccacattttctttttcttttttgagacagggtcttgctctgtcacccagactggagtgcagtggtgtgatcatagctcactgcaccctcaacctcctgggttcaagcaatcctcctgcctcagcctcctgaacagctgggaccacaggtgcacgccaccacacctggcttttttttgttgtttttagagacagggtctcactatattgctcaggctggtcttgaactcctgggctcaagtgatcttcccacgtgggcctcccaaaacgctggaactacaagtgtgagccaccgcgccctggcccaagccctccacattttcaatccaggaagccttgagtctgtgttgtgtcctgacacctccaagttctaagggccgtcaggacaacggggagggtttggggacagagtgtccttcctctgtcctctcatcccag

SEQ ID NO: 163 - DNA, 1777 bp, Homo sapiens
  CDS (299)..(1042)
  misc_feature (1)...(1777): n = a,t,c or g
agcaacgactccttcgtcagtgagattgcagcatcttttcaaagaagcttcgtgtaggtatgaacaagatgaagccacagcttttattccttctgaagttacagaaactcggttcccttttgaagcatttaaatttaatttcttcagttttctacagttagacaggtgcaggagagcagcatctgatatatcgcagctccgtagatctagagtttggacttcaggatgtaaaatctcacttatatttgaatctgttatctgtccctgcatactcattattttaatcagtctgtcttttatgttgggaggcaaaggcttaatgtctgtgagatatctggaaatattcttcatgaagcctttgcctcccaacataaaagacagactgattaaaataatgagtatgcagggacagataacagattcaaatataagtgagattttacatcctgaagtccaaactctagatctacggagctgcgatatatcagatgctgctctcctgcacctgtctaactgtagaaaactgaagaaattaaatttaaatgcttcaaaagggaaccgagtttctgtaacttcagaaggaataaaagctgtggcttcatcttgttcatacctacacgaagcttctttgaaaagatgctgcaatctcactgacgaaggagtcgttgctcttgcactcaattgccagctgctaaagatcatcgatttaggtggctgcttaagtattactgatgtgtccttacatgcattaggaaaaaactgcccatttttgcagtgtgtcgacttttcagctactcaggtatctgacagtggtgtgattgcacttgttagtggaccttgtgcgaagaaattagaggagattcatatgggacattgtgtaaatctgactgatggggctgtcgaagctgtccttacttactgtcctcaaatacgtatattactcttccatggatgccccttgataacagatcattcccgagaagtgttggagcaattagtaggcccaaacaaactaaagcaagtgacatggactgtttattgatgcttttttgaagatgatcaatgctaggaaagcttatcaaaactactttcccaggaaaccatctatagagatttgcattctacttaatgttaacactatttttaattattttattgtcttaagttataactctcagagaattagctaagtcttggtatatacatggtttgtgctttactcttaaacatctttaaagtgctattattctatatctgttggatgagtcattatttttgaaatgataatcctagcatgaactctgatctatggtgttggattctgtttcttaaataactttaaaattaactgttttcccttgagatttccttctcctatgtaggtatttgagctattgttctaagtttacctgtaagtataaaccttgggagaatctaagtaaacatatttctaaaagcatagttaccttcctattttctggctcttaccttcttggagtatttaaatgcccatttgccaaaagcagacctgaacatcaagcctggttaattcntcaaagaatttaggggattggtttccccggaaatggagtgacttattagccattcagcggtattaggaatacagaggctcttgcccagccacatccantccattgnttttaaggggactcctcccaggtacattttaaggcaccggtagcnttccctccctaggcaaattgcatccnaaaggnggtaaaaaggggnaatacnggatatccctcnggggctggtt

SEQ ID NO: 164 - DNA, 1939 bp, Homo sapiens
  CDS (1)..(1704)
atggattctatactgattcctccacttactaagaggttgaaaatgggcaagtcactttacctctctgtgccgcagtttcctgcttgtaacacctacagctgctccctgaacctcagagatgccaatgaggcggatacagggacgtacttctttcaggtggagagaggttattacatgaaatacagttacggaaatgagaagttgttcttgcatgtgacaaggcctcctctaagtcttgagcccgcagttcctgagagaagaaccctgaggaacagacgttccctcgcggccctggcacctctaaccccagacatgctgctgctgctgctgcccctgctctgggggagggagagggcggaaggacagacaagtaaactgctgacgatgcagagttccgtgacggtgcaggaaggcctgtgtgtccatgtgccctgctccttctcctacccctcgcatggctggatttaccctggcccagtagttcatggctactggttccgggaaggggccaatacagaccaggatgctccagtggccacaaacaacccagctcgggcagtgtgggaggagactcgggaccgattccacctccttggggacccacataccgagaattgcaccctgagcatcagagatgccagaagaagtgatgcggggagatacttctttcgtatggagaaaggaagtataaaatggaattataaacatcaccggctctctgtgaatgtgacagccttgacccacaggcccaacatcctcatcccaggcaccctggagtccggctgcccccagaatctgacctgctctgtgccctgggcctgtgagcaggggacaccccctatgatctcctggatagggacctccgtgtcccccctggacccctccaccacccgctcctcggtgctcaccctcatcccacagccccaggaccatggcaccagcctcacctgtcaggtgaccttccctggggccagcgtgaccacgaacaagaccgtccatctcaacgtgtcctacccgcctcagaacttgaccatgactgtcttccaaggagacggcacagtatccacagtcttgggaaatggctcatctctgtcactcccagagggccagtctctgcgcctggtctgtgcagttgatgcagttgacagcaatccccctgccaggctgagcctgagctggagaggcctgaccctgtgcccctcacagccctcaaacccgggggtgctggagctgccttgggtgcacctgagggatgaagctgaattcacctgcagagctcagaaccctctcggctctcagcaggtctacctgaacgtctccctgcagagcaaagccacatcaggagtgactcagggggtggtcgggggagctggagccacagccctggtcttcctgtccttctgcgtcatcttcgttgtagtgaggtcctgcaggaagaaatcggcaaggccagcagcgggcgtgggagatacgggcatagaggatgcaaacgctgtcaggggttcagcctctcaggggcccctgactgaaccttgggcagaagacagtcccccagaccagcctcccccagcttctgcccgctcctcagtgggggaaggagagctccagtatgcatccctcagcttccagatggtgaagccttgggactcgcggggacaggaggccactgacaccgagtactcggagatcaagatccacagatgagaaactgcagagactcaccctgattgagggatcacagcccctccaggcaagggagaagtcagaggctgattcttgtagaattaacagccctcaacgtgatgagctatgataacactatgaattatgtgcagagtgaaaagcacacaggctttagagtcaaagtatctcaaacctgaatccacactgtgccctcccttttatttttttaactaaaagacagacaaattcctacctc

SEQ ID NO: 165 - DNA, 792 bp, Homo sapiens
  CDS (590)..(766)
ctgatctagataatttatgtgtatacaaggttcattaaaaatagtttcttataatttttccctgatgacaaaagcaaaaaaaaaatttttcctgaattgatacattttcagattaatattatgaatctcacttataatttatgaaaaattctaaggtattaatatatacggaaagaacagtagtttgatttgaccaattttctaacatctgaaataaacacttcaaataaaatattagaataaaatatatgtactgccaaatggaaagttaattcattttcttaatctataatatatatagacagagatgaagaaaatgtgataattacaaaaaagatgatgaggaaacgcagtgactgtctgtaaaaccaactttttattcacaccttagcatcatgctgaagcccactgaatgtaaaggaaatacttttcccatgtgtatccatatttctcaagtaaactgaggagtccgtatattatcgacttcagtctgtgtacatctaaagggggctactcttggcttacaagtcaatttttaagatacctggggctttgccttctttaacagcccttttgctcagaatgttctatgctgtttgggcttgccttgcaattgatcctcgatttgaaactgacaactgtgaaccagcgagaaagtgatgtggcaagagttgccacggctgaagaatattcaaagaaaggtctgcttggacaggaaacacttcatgctggatcacagacaagaatgcagattcttatctcctgagaccccttgaattccaccgcaagtgg

SEQ ID NO: 166 - DNA, 797 bp, Homo sapiens
  CDS (206)..(418)
aattctccctaaagttcagaaaataacataatttggcttatttggtacaaaaatcatataggaagcattgtcaaatatgaaatggtgttgggtttttgagggctgcatttttaaaatatgttattagtatgtgttccaaaattatgggaaattcctataattctatataactcagtgtacattatcagtaataatcataattgttatgttaaaattattgtgtgccgcagaggtaacaaatgtccttttcaactgtgtttttgactatggctgtcctaaaactttttgtcatccatggacaatttttgtcttgttttggtcctctttagaaggtggctttataatcagctacaaaactctaacaggtgctcttgaatgcaggtttctgataactttggagattgtgacatcagaatagaggaaaaactttcaggactcatggagagctataaaatattcatgagtatcaagcagaacaggaattaactgcatggactgaactgatctttttgactttttgcttaaaaagttgctgatctttttgtttgcttttcagagccttaaaacttttcttttgagctattggcagcttttaacaatttacgatacttccataaacaaagcttgcagcctatttgttgctctttaactgacttctgccgaattcgcacactattcgctcgcactccctactcatcggccctccggcaataccccacccggccccaccaatcctgtgctcctcgatacctagacccctactgggcgcacctgcgttcgcctaccaccgagtggcg

SEQ ID NO: 167 - DNA, 1056 bp, Homo sapiens
  CDS (241)..(1050)
tgcctgtatgtctgaggctgggtttgaagcctccagcgtgtttggagttaatccccattaggttggactccgcccctttctcccaaaggtaaagcaaggttttcaggcatcactgcaaagggcagctagtattcccatccttgtctaacaagctgtaaggagaagttgtttctgagatctgagcctgaagagagggaacaagtcagtcagccttcgtggtcagaagagaaacctgtgaccatgaggagcagcctgaccatggtgggaaccctctgggccttcctgtcccttgttactgctgtgaccagttctaccagttacttcctaccttactggctctttggatcccagatggggaagccagtgtcattcagcacattccggaggtgcaactaccctgtgcggggagagggacacagtctgatcatggtggaagaatgtgggcgctatgccagcttcaatgccatcccaagcctggcctggcagatgtgcacagtggtgacaggtgccggctgtgctctgctgctcctggtggcactagctgctgtcctgggttgctgcatggaggagctcatctccagaatgatgggacgttgcatgggagcagcgcagtttgttggagggctgctgataagctcaggctgtgccttataccctttaggatggaatagcccggagataatgcaaacatgtgggaatgtctccaatcaatttcagttaggtacctgtcggcttggctgggcctattactgtgctggaggtggaacacctgcagccatgttgatctgcccctggctctcttgctttgctggaagaaacccccagcctgtcatattgggggggaagcaccatgaggaaaaccacttcttatgctatggagcttggccattgccctcaacccttgagcttcgaaaagaagaccggggggggcgggcaacagggaagcaagtgaccccccaaccacttagattccatgtctctacttggatgtctagtagacttgacagagtgtacatatccataaccaagatccaaatcttccaatcctaaacccat

SEQ ID NO: 168 - DNA, 958 bp, Homo sapiens
  CDS (73)..(858)
  misc_feature (1)...(958): n = a,t,c or g
taacgcgatctgagcctgaagagagggaacaagtcagtcagccttcgcggacattttatttatcctgtgaccatgaagagcagcctgaccgtggtgggaaccctctgggccttcctgtcccttgttactgctgtgaccagttctaccagttacttcctaccttactggctctttggatcccagatggggaagccagtgtcattcagcacattccggaggtgcaactaccctgtgcggggagagggacacagtctgatcatggtggaagaatgtgggcgctatgccagcttcaatgccatcccaagcctggcctggcagatgtgcacagtggtgacaggtgccggctgtgctctgctgctcctggagtcactagctgctgtcctgggttgctgcatggaggagctcatctccagaatgatgggacgttgcatgggagcagcgcagtttgttggaggtccaatgcagcccttctgtgaagccttccctgatctacttttgacatctttagcagatatgaacgatcctgtaactccaagaggaatatggggtagaatgaatggcgggggctgggggggtgggctgctgataagctcaggctgtgccttataccctttaggatggaatagcccggagataatgcaaacatgtgggaatgtctccaatcaatttcagttaggtacctgtcggcttggctgggcctattactgtgctggaggtggagcagctgcagccatgttgatctgcacctggctctcttgctttgctggaagaaaccccaagcctgtcatattggtggagagcatcatgaggaataccaattcttatgctatggagcttgaccattgcctcaaaccttgagctttgaaagaagattggagagggttgggaanggggaaggagggagccctgaaaaagaaggtacntagggtttaaggccattttntcaacctgacttttt

SEQ ID NO: 169 - DNA, 1906 bp, Homo sapiens
  CDS (108)..(1748)
acgcctgacgtaccggtccggaattcccgggtcgacgatttcgtcagggctggaaggtcctggcctgggatgaagaggggactgcctaaggctggggtggctccaagatgccggcatgggaaactgggggtttcctggtaactggactcctagcaaactcccaaggattcaggatgtcgctgctgagcctgccctggctgggcctcagaccggtggcaacgtccccatggctactcctgctgctggttgtgggctcctggctactcgcccgcatcctggcttggacctatgccttctataacaactgccgccggctccagtgtttcccacagcccccaaaacggaactggttttggggtcacctgggcctgatcactcctacagaggagggcttgaagaactcgacccagatgtcggccacctattcccagggctttacgatatggctgggtcccatcatccccttcatcgttttatgccaccctgacaccatccggtctatcaccaatgcctcagctgccattgcacccaaggataatctcttcatcaggttcctgaagccctggctgggagaagggatactgctgagtggcggtgacaagtggagccgccaccgtcggatgctgacgcccgccttccatttcaacatcctgaagtcctatataacgatcttcaacaagagtgcaaacatcatgcttgacaagtggcagcacctggcctcagagggcagcagttgtctggacatgtttgagcacatcagcctcatgaccttggacagtctacagaaatgcatcttcagctttgacagccattgtcaggagaggcccagtgaatatattgccaccatcttggagctcagtgcccttgtagagaaaagaagccagcatatcctccagcacatggactttctgtattacctctcccatgacgggcggcgcttccacagggcctgccgcctggtgcatgacttcacagacgctgtcatccgggagcggcgtcgcaccctccccactcagggtattgatgattttttcaaagacaaagccaagtccaagactttggatttcattgatgtgcttctgctgagcaaggatgaagatgggaaggcattgtcagatgaggatataagagcagaggctgacaccttcatgtttggaggccatgacaccacggccagtggcctctcctgggtcctgtacaaccttgcgaggcacccagaataccaggagcgctgccgacaggaggtgcaagagcttctgaaggaccgcgatcctaaagagattgaatgggacgacctggcccagctgcccttcctgaccatgtgcgtgaaggagagcctgaggttacatcccccagctcccttcatctcccgatgctgcacccaggacattgttctcccagatggccgagtcatccccaaaggcattacctgcctcatcgatattataggggtccatcacaacccaactgtgtggccggatcctgaggtctacgaccccttccgctttgacccagagaacagcaaggggaggtcacctctggcttttattcctttctccgcagggcccaggaactgcatcgggcaggcgttcgccatggcggagatgaaagtggtcctggcgttgatgctgctgcacttccggttcctgccagaccacactgagccccgcaggaagctggaattgatcatgcgcgccgagggcgggctttggctgcgggtggagcccctgaatgtaagcttgcagtgactttctgacccatccacctgtttttttgcagattgtcatgaataaaacggtgctgtcaaaaaaaaaaaagggggggccctttaaagggatcaaagtttaatacccggggcggggaagggtaaatctttttatagggggccccaaaattaaatctcggg

SEQ ID NO: 170 - DNA, 1882 bp, Homo sapiens
  CDS (108)..(1814)
acgcctgacgtaccggtccggaattcccgggtcgacgatttcgtcagggctggaaggtcctggcctgggatgaagaggggactgcctaaggctggggtggctccaagatgccggcatgggaaactgggggtttcctggtaactggactcctagcaaactcccaaggattcaggatgtcgctgctgagcctgccctggctgggcctcagaccggtggcaacgtccccatggctactcctgctgctggttgtgggctcctggctactcgcccgcatcctggcttggacctatgccttctataacaactgccgccggctccagtgtttcccacagcccccaaaacggaactggttttggggtcacctgggcctgatcactcctacagaggagggcttgaagaactcgacccagatgtcggccacctattcccagggctttacgatatggctgggtcccatcatccccttcatcgttttatgccaccctgacaccatccggtctatcaccaatgcctcagctgccattgcacccaaggataatctcttcatcaggttcctgaagccctggctgggagaagggatactgctgagtggcggtgacaagtggagccgccaccgtcggatgctgacgcccgccttccatttcaacatcctgaagtcctatataacgatcttcaacaagagtgcaaacatcatgcttgacaagtggcagcacctggcctcagagggcagcagttgtctggacatgtttgagcacatcagcctcatgaccttggacagtctacagaaatgcatcttcagctttgacagccattgtcaggagaggcccagtgaatatattgccaccatcttggagctcagtgcccttgtagagaaaagaagccagcatatcctccagcacatggactttctgtattacctctcccatgacgggcggcgcttccacagggcctgccgcctggtgcatgacttcacagacgctgtcatccgggagcggcgtcgcaccctccccactcagggtattgatgattttttcaaagacaaagccaagtccaagactttggatttcattgatgtgcttctgctgagcaaggatgaagatgggaaggcattgtcagatgaggatataagagcagaggctgacaccttcatgtttggagggcctcaatatctgggcgctgtccaccctccggtgctgaagccaagcttacctggctgctcctcaggccatgacaccacggccagtggcctctcctgggtcctgtacaaccttgcgaggcacccagaataccaggagcgctgccgacaggaggtgcaagagcttctgaaggaccgcgatcctaaagagattgaatgggacgacctggcccagctgcccttcctgaccatgtgcgtgaaggagagcctgaggttacatcccccagctcccttcatctcccgatgctgcacccaggacattgttctcccagatggccgagtcatccccaaaggcattacctgcctcatcgatattataggggtccatcacaacccaactgtgtggccggatcctggagtctacgaccccttccgctttgacccagagaacagcaaggggaggtcacctctggcttttattcccttctccgcagggcccaggaactgcatcgggcaggcgttcgccatggcggagatgaaagtggtcctggcgttgatgctgctgcacttccggttcctgccagaccacactgagccccgcaggaagctggaactgatcatgcgcgccgagggcgggctttggctgcgggtggagcccctgaatgtaggcttgcagtgactttctgacccatccacctgtttttttgcagattgtcatgaataaaacggtgctgtcaaaaaaaaaaa

SEQ ID NO: 171 - DNA, 1547 bp, Homo sapiens
  CDS (100)..(1389)
gcaccaccgcgccggaattcccgcgacgacgatttcgtagctccctgagactttccctgggcctcaggatctcaccctccatcctgtctgccctgcaggatgccgcagctgagcctgtcctggctgggcctcgggcaggtggcagcattcccgtggctgctcctgctgctggctggggcctcccggctcctggccggcttcctggcctggacctatgccttctatgacaactgccgccgccttcagtactttccacaacccccaaaacagaaatggttttggggtcaaccaggacctcctgctattgcgcccaaggatgatctctccatcaggttcctgaagccctggctgggagaagggatactgctgagtggcggtgacaagtggagccgccaccgtcggatgctgacgcccgccttccatttcaacatcctgaaaccctatataaagatcttcaacaggagtgtgaacatcatgcacgacaagtggcagcacctggcctcagagggcagcagtcgtctggacatgtttgagcacatcagcctcatgaccttggacagtctgcagaaatgcatcttcagctttgacagccattgtcaggagaggcccagtgaatatattgctaccatcttggagctcagtgcccttgtagaaaaaagaaaccagcatatcctccagcacatggactttctgtattacctctcccatgacgggtggcgcttccgcagggcctgccgcctggtgcacgacttcacagatgccgtcatccaggagcggcgccatacccttcccactcagggccatgacaccacagccagtggtctctcctgggtcctgtacaacctcgcgaggcacccagaataccaggagcactgccggcaggaggtgcaagagcttctgaaggaccgcgatcctaaagagattgaatgggacgacctggcccagctgcccttcctgaccatgtgcgtgaaggagagcctgaggttacatcccccagctcccttcatctcccgatgctgcacccaggacattgttctcccagatggccgagtcatccccaaaggcattacctgcctcatcgatattataggggtccatcacaacccaactgtgtggccggatcctgaggtctacgaccccttccgctttgacccagagaacagcaaggggaggtcacctctggcttttattcctttctccgcagggcccaggaactgcatcgggcaggcgttcgccatggcggagatgaaagtggtcctggcgttgatgctgctgcacttccggttcctgccagaccacactgagccccgcaggaagctggaattgatcatgcgcgccgagggcgggctttggctgcgggtggagcccctgaatgtaagcttgcagtgactttctgacccatccacctgtttttttgcagattgtcatgaataaaacggtgctgtcaaaaaaaaaaaagggggggccctttaaagggatcaaagtttaatacccggggcggggaagggtaaatctttttatagggggccccaaaattaaatctcggg

SEQ ID NO: 172 - DNA, 1005 bp, Homo sapiens
  CDS (257)..(400)
  misc_feature (1)...(1005): n = a,t,c or g
gggtctgccctcgaccgccnnnncttcgacgggctgatgtatataactatctattcgatgatgaagataccccaccaaacccaaaaaaagagatctctcgaggatccgaattcgcggccgcgtcgaccacttgctgaactggctcctggggccatgaggctgtcactgccactgctgctgctgctgctgggagcctgggccatcccagggggcctcggggacagggcgccactcacagccacagccccacaactggatgatgaggagatgtactcagcccacatgcccgctcacctgcgctgtgatgcctgcagagctgtggcttaccagatgtggcaaaatctggcaaaggcagagaccaaacttcatacctcaaactctggggggcggcgggagctgagcgagttggtctacacggatgtcctggaccggagctgctcccggaactggcaggactacggagttcgagaagtggaccaagtgaaacgtctcacaggcccaggacttagcgaggggccagagccaagcatcagcgtgatggtcacagggggcccctggcctaccaggctctccaggacatgtttgcactacttgggggagtttggagaagaccagatctatgaagcccaccaacaaggccgaggggctctggaggcattgctatgtgggggaccccagggggcctgctcagagaaggtgtcagccacaagagaagagctctagtcctggactctaccctcctctgaaagaagctggggcttgctctgacggtctccactcccgtctgcaggcagccaggagggcaggaagcccttgctctgtgctgccatcctgcctccctcctccagcctcagggcactcgggcctgggtgggagtcaacgccttcccctctggactcaaataaaacgtcgacgcggccgcgaattcggatcctcgagagatctctttttttgggtttggtggggtatcttcatcatcgaatagatagttatatacatcagccc

SEQ ID NO: 173 - DNA, 1406 bp, Homo sapiens
  CDS (782)..(1327)
tttcgtattacgtgtgctgccctttgagaagtttgttgatgaaaggagaaaggaaatagtagcaccagaggaaaagagcagggatttaccctgttcttacaggataacagctccttgctcttttcagctagcttttcaaaggacagggataggacagccccctgccttatttcggatacttggatctataacctccagaaattcaagctgaagtagctggaggtcggagaggaatgagaactgcctgggtggggtctgccagccagacactgccaggatagccacaaggagacaacttggaagaacagacagcaaccacgttggactcaggcagtcctgggtttgaatcctgtctctgtcaccacctagcctgatgaccttgggcacatcctgagcaccctgtgccttatctgtaaaatggaaacaatcatgccgacctttcagggtggttttgaggattagagactagctcctgacacacagtaggtaatcgtaaatgggtgctattatttggcccgacccacgttataggacagaacgtctaacggatgcgtcagaacctgcgccctccggatcttggagggtacagagggcgcccctcggcctcctccctttcggaggtggggacaaggtggaggaagggctgcaggaggaggagctctagcatcgcgacccgccccgtcccgtccagtctggcctgggcgccgcgggaacgctgtcctagctgccgccacccgaacagcctgtcctggtgccccggctccctgccccgcgcccagtcatgaccctgcgcccctcactcctcccgctccatctgctgctgctgctgctgctcagtgcggcggtgtgccgggctgaggctgggctcgaaaccgaaagtcccgtccggaccctccaagtggagaccctgggggagcccccaaaaccatgtgccgagcccgctgcttttggagacacgcttcacatacactacacgggaagcttggtagatggacgtattattgacacctccctgaccagagaccctctggttatagaacttggccaaaagcaggtgattccaggtctggagcagagtcttctcgacatgtgtgtgggagagaagcgaagggcaatcattccttctcacttggcctatggaaaacggggatttccaccatctgtcccagcggatgcagtggtgcagtatgacgtggagctgattgcactaatccgagccaactactggctaaagctggtgaagggcattttgcctctggtagggatggccatggtgcccacgcctcctgggcctcattgggtatcacctatacagaaaggccaatagacccaaagtctccaaaaagaagctcaaggaagagaaacgaaacaagagcaaaaagaaataataaataataaattttaaa

SEQ ID NO: 174 - DNA, 2383 bp, Homo sapiens
  CDS (937)..(2037)
gaccaaggaggcgcccgcggctgcagagctgcagagcgggatctcttcgagctgtctgtgtccgggcagccggcgcgcaactgagccagaggacagcgcatcctttcggcgcgggccggcagggcccctgcggtcggcaagctggctccccgggtggccaccgggacccccgagcccaatggcgggggcggcggcaaaatcgacaacactgtagagatcacccccacctccaacggacaggtcgggaccctcggagatgcggtgcccacggagcagctgcagggtgagcgggagcgcgagcgggagggggagggagacgcgggcggcgacggactgggcagcagcctgtcgctggccgtgcccccaggccccctcagctttgaggcgctgctcgcccaggtgggggcgctgggcggcggccagcagctgcagctcggcctctgctgcctgccggtgctcttcgtggctctgggcatggcctcggaccccatcttcacgctggcgcccccgctgcattgccactacggggccttcccccctaatgcctctggctgggagcagcctcccaatgccagcggcgtcagcgtcgccagcgctgccctagcagccagcgccgccagccgtgtcgccaccagtaccgacccctcgtgcagcggcttcgccccgccggacttcaaccattgcctcaaggattgggactataatggccttcctgtgctcacccccaacgccatcggccagtgggatctggtgtgtgacctgggctggcaggtgatcctggagcagatcctcttcatcttgggctttgcctccggctacctgttcctgggttaccccgcagacagatttggccatcgcgggattgtgctgctgaccttggggctggtgggcccctgtggagtaggaggggctgctgcaggctcctccacaggcgtcatggccctccgattcctcttgggctttctgcttgccggtgttgacctgggtgtctacctgatgcgcctggagctgtgcgacccaacccagaggcttcgggtggccctggcaggggagttggtgggggtgggagggcacttcctgttcctgggcctggcccttgtctctaaggattggcgattcctacagcgaatgatcaccgctccctgcatcctcttcctgttttatggctggcctggtttgttcctggagtccgcacggtggctgatagtgaagcggcagattgaggaggctcagtctgtgctgaggatcctggctgagcgaaaccggccccatgggcagatgctgggggaggaggcccaggaggccctgcaggacctggagaatacctgccctctccctgcaacatcctccttttcctttgcttccctcctcaactaccgcaacatctggaaaaatctgcttatcctgggcttcaccaacttcattgcccatgccattcgccactgctaccagcctgtgggaggaggagggagcccatcggacttctacctgtgctctctgctggccagcggcaccgcagccctggcctgtgtcttcctgggggtcaccgtggaccgatttggccgccggggcatccttcttctctccatgacccttaccggcattgcttccctggtcctgctgggcctgtgggattatctgaacgaggctgccatcaccactttctctgtccttgggctcttctcctcccaagctgccgccatcctcagcaccctccttgctgctgaggtcatccccaccactgtccggggccgtggcctgggcctgatcatggctctaggggcgcttggaggactgagcggcccggcccagcgcctccacatgggccatggagccttcctgcagcacgtggtgctggcggcctgcgccctcctctgcattctcagcattatgctgctgccggagaccaagcgcaagctcctgcccgaggtgctccgggacggggagctgtgtcgccggccttccctgctgcggcagccaccccctacccgctgtgaccacgtcccgctgcttgccacccccaaccctgccctctgagcggcctctgagtaccctggcgggaggctggcccacacagaaaggtggcaagaagatcgggaagactgagtagggaaggcagggctgcccagaagtctcagaggcacctcacgccagccatcgcggagagctcagagggccgtccccaccctgcctcctccctgctgctttgcattcacttccttggccagagtcaggggacagggagagagctccacactgtaaccactgggtctgggctccatcctgcgcccaaagacatccacccagacctcattatttcttgctctatcattctgtttcaataaagacatttggaataaacgagcatatcataaaaaaaaaa

SEQ ID NO: 175 - DNA, 378 bp, Homo sapiens
  CDS (32)..(286)
aacaataaaagaaaaaacgttagaccaaacaatgcggccgaccaacagtggtccgacctctagcccgagggttcaaaacgccctcaaagtaaccgtctttaaactgaactcaaagaatgcaaaagcggcaagttcagaaaataaaaggcgagaacaggactttaagtgcatttcaaacccacgggccagaaatcgtaccaccgtcaaccagccgcaccatttggtccaagatttcctcttcaccattctgaaactgggtttatccaacacactgatacattcataaaatttggaagagtcagtggaagtcacaaggaccgaatatttgcactctttcagtgaatgccagcaaatctgttattccataaataaaaaagt

SEQ ID NO: 176 - DNA, 662 bp, Homo sapiens
  CDS (222)..(383)
ctgcaggtaccggtccggaattcccgggtcgacccacgcgtccgcactgtgtgcacaagagagcgataagcactctggatcatttaaaggaaaaggagatgcgactcctaccttcagaaggttataatggacttattataatggacttattatacggacaaacaaatgaacagttacacacatgcaaagctacagcagtacaagatagtatgtcatgagtgatgtgcttaatgaaacagatcatatatctgctgtatgtagggctctgttcaattctcacagcattcttatttactcctcaccatgtccttgagaggtataggtattattgtcctgattttagagagattaagaaacttggtcaaggctatacaactaattagtagaagaattaaaattcaatcctaagtctgtctgaccccaaagcccatgaatactcttaactcctatgctgtaaatataaaaagactgaacgggggccagacgtggtggctcatgcctgtaatcccagcactttgggaggatggtttgagcccaggagttcaagaccagcctgggcactatagtgagaccctgtctccattcaaaaaaaaaaaaaagggggggcctcttaaaaggctcaattttacttaccgcgtgctggaaagttatatgtttttatc

SEQ ID NO: 177 - DNA, 659 bp, Homo sapiens
  CDS (274)..(591)
ctgaggcaccgcgccggaattcccgggtcgacccacgcgtccggtagaataatatttgtttgttttttgcaatgtacaaattaagggcatgaatcctggagccaaactaactgagttccaaatcctgatgctgccccatattaattctgtgaattcgggcaaatgacttagtttgtctaaacctcaattatctcatctataaaaggcagctagatcttaactcactgggttctcgtgaggattaaatgagatagtgcccctaaggtttctggtatgaaggaggcactccttaaatgttcgagacttgccagagggcttcttctctgtctggactgtgctaatgaccacagatccccggttgagaggaatgcccagaccacactcatcctacactcatccctatactcattgtcccttgggaaccaactgcagggaggaggggaaatggccaccactggagggagtactcagcaggccaagacttatgggggactcttccaaattggggccatggaaccggcactatttctactctttattttccttttggcatccttttgggttcacccgagctatagaataacctactgagacgaatttagcaaatacattactgaagcttctccctcggaagttgggcccaagccatgtgaatgggc

SEQ ID NO: 178 - DNA, 664 bp, Homo sapiens
  CDS (91)..(234)
cctgcaggcaccggtccggaattcccgggtcgacccacgcgtccgtttttcccaataattacttcaactcacagttagttaaagcataacatgttggaaactttcttgtttaaactcttcctattcttcaccttattggttaatttatttattaccaatgaccaactcagtgtgggtagtatttttctcagcttccagctcccagctttctttcttgatatggctgaattttgagatactcaaagcaagcagaccataaagagagacagataaaactggacctgggtgttcatatgtgtatgtgtgattgtgtgttggagggttattatccctttttaaagaactacttataggatggtggcaggacctttgaaattgcaggctgaattgattattagcatatgtaaatttgggtaagttattaagcaactttcaaagtgtttttggtttctcttctgtaaaagtaggaggataataatatctaatgatcttgttgtagattaaatgatgaaaagcaccttacacagtgagtgttacgtagtaagtagacaataaatggtaacatgactattatcatcatgctgctgctatcgtggatatttgcattttatagctttggcaaactgaaaacttccttttgttgtgaaatatcttgatgaacgca

SEQ ID NO: 179 - DNA, 415 bp, Homo sapiens
  CDS (105)..(245)
atcgctccggaattcccgggtcgacccacgcgtccggtgaacttggggtgttgattcagcatcacttgccatgacccccaagccctcctctcagctttctctccatgacttttctcttacacgttctggtgacagctctgtcctctcattccactgggcgtaggggtactaactgcttcatgttactttcctcagggaatcatcctatcccttgtggttccctgacaccctacccacacctttgaaaatggagcctttattacatactcctcgggtctccccctactaaagtgggccgtctctttcctgttgaagcattgactgatacactggcgaaagggaacaccctgcctgcccttcaccccctcccaagagcctaaagagacttctgagcttcaggaagaatctgccgtga

SEQ ID NO: 180 - DNA, 669 bp, Homo sapiens
  CDS (299)..(421)
ctgaggcaccgggccggaattcccgggtcgacccacgcgtccgctcaaatattctatagactgtttaaatataaaccaaactaaactatttaagttccaggatattagtgactttttacctgagatacttgctcagattatctatctgttgtgaactccattttaaaagcacctcactataccatgcttgaagtcaggtagtctgtagacttcatcacagcccctttatatataattacttctctcacggaggagtatggtgtatttacctgtatctttgaatggcttaagattagcatgcttcagctatgttcttgctcctatcaaagtgaaacctgggggtggctcagagacacgtgacgggtttagaatcccagagagcacaccctcactaaaggccggttactgcgaccataaacacttcttgcccacaattcatctttttaaaatttttcgtttcagaaaatgtgatgttctgaatcgtggattttcaggttacaataccaggtgggccaaaattatccttccaagattaatcaggaaaggaaacagtttggacatcccagtagcagttacaattttctttggggccaatgacagtgcactaaaagatgagaatcccaagcagcacattcccctggaggagtacgctgcgaacctaaagagcat

SEQ ID NO: 181 - DNA, 616 bp, Homo sapiens
  CDS (83)..(247)
atttggccctcgaggccaagaattcggcacgagaatttgaagtatatttaaagtcaataagcaaacattcaaaaacacttgtatgactctcctaaatctttattatttaaatagttttctattgtactcgaaaagatttgaaggtatatccttctgtgtccaaaaggtcagtataatattatgtatacattatcttcgtagcacaactatttggaataagcttttcttcagagatgtatcggcataaaggagctctgatttgtttaaatattttaaaaggtattaaaatatattttcatttgagaacctcccctatatactcaggaaagctcaccttttcaaaacctgagtgttaactctttccaaacgttctgtaatgtttatcaaaaacaaaaaataatgaaaagaggtgaacattattttggagagcctcattggcttcatctactcagatcatccacaatcactggagaggaggcagaattttgtcactgggacagcagtcacttgacccagaatcctctaccgattccctccagggagcccttcccattggctctttcctagaaatttcatgtttttgggttaacctcagataaaactttggccttaacac

SEQ ID NO: 182 - DNA, 993 bp, Homo sapiens
  CDS (158)..(703)
gattggacttatttcccacattttttcaagctctggatattaccacacttttcactatttacctatctggaaaagcaaatatctttatatttaaatttttataacctcaatcatcagtgaaaacatttctaatgtttatatcacttgcttgtaaatcatgcattttcctgtgaactgtttcttcaagtcattacatatttttcttttactacaggtttttcttgccacttttttgagaaaaaaattaagtaaggtagccttcagttgtcttgttgaatttttctactattgttattattttttagactttgctagtagtgtttcttttttgttttgttttgttttgcttttgagacggagtcttactctgtcacccaggctggagtgcagtgacacgatcttggctcactgcaaccttcgcctcccgggttcacgctattcttctgcctcaacctcccgagtagctgggattacaggtgtgcaccaccacacctatgtaaattttgtatggacagtacagaaggcggttcactgtgttggccaggctagctgggaactcctgacctcaagggatccacccaccttggcctcccacagggctgggattacaggcatgagccaccgcacctgggcaaaagtgttccttaaaagagtgatttttctaaatagagaatacgatttgactatgttttgctttttaaaatagacatactcatctctgactgttattctaaggattaagtgctatataaagcacagcaaataattttgccagatgcaatagaaattagtttcttgaggaatgtgtcaatatctagcaattttacataggcatttaccctttgaaccagaaacttcacttatagaaatctatcctaaagacacacagtcaaaaattcaagacgggcatggtggctcatggctgcaatcccagcactttaggagacagaggaggaggttgcagaattccaccacactgactatggactcgaa

SEQ ID NO: 183 - DNA, 628 bp, Homo sapiens
  CDS (133)..(333)
ttcgagcttctcttcaatacccatatgtatctcaaagtaatgtaatcagcaaattagcagtgtaaaaatgctagataacttattctgaaatccacttccgaaatcatttgagcagctaagtttgaaaaactcatgttggtaccaacatttctctctttagtgtgtgatttttccctttttgtgcttctcctccttggctgtctctcctttctccttccccctcacttaccttgcacttccttccctctccatctctggaggcttctctctccttttatatcttttctgtacttactgctgcttcttagttataaaatgaattgtataatttaaactgtttaataaatggactttggtatttggaattttcaagtcgggtactaaaacctttataaccttagccccccctccttgaaccctctagaattaacacaatcatgttaaggtttatatagcaagtccttgtgatatactttttgttgatattgctaggcaaatatgctcttaacaagtaattgcctgaggcaggaggaatgcttgagcccaagaatccgagtttgcagggagctgggatcaccactggactctattctggacaacagagccggacactgtgtcaaaaaaaaaa

SEQ ID NO: 184 - DNA, 717 bp, Homo sapiens
  CDS (71)..(295)
ctcaggctgcctgctttttgtttgccatagctggtcctgttacctctcattttcctccctggaggcagttatgttgcctctatttaagcactcaccagtcagaatcttcctattctgcttaaatacccaacatttgtcagtaagaaataattttgtatttaattgtgtatccccaggaattttgcccatttctctttgccttgctttcaatcatgatagaagcacctttttcttttcaataatattattgttaaaagccttaattattttgtcttctctgcttcaaactaagtaattctgacttccttaatcttttatcacaggctctgttctccaaactttcagtcttttctgttggtccatattccattggtttctcctcctactcattcagaggcaaattaaggtggttttttaagttttggtttgtagactatgtcgttatgtgagaaatttactttaggtttgtattgtcaaccccatagcacaagccaggtacttaatttaggcattagtcagtgatatagattgaatatttgtccctgcgcaaatctcatgttgaattgcaatccccagtgttgggggtggcgcttggtggaaggcgaaaggatcaaggcgaccggcggcccccacccctcgggggcttttcttaacggttgtggaaattttgtgcccccccccccaaaaaaaagggtgggggaaacgtttccccccttt

SEQ ID NO: 185 - DNA, 742 bp, Homo sapiens
  CDS (128)..(361)
atttggccctcgaggccaagaattcggcacgaggccttgttttgtaacaaatgtgaggactcaaaggaacacccagcctacctctctggtctcagcttttcccagtcatgaggagctcacttctcccatgaagcccatcctgctggtcctcagctctatcacccgtgccctccttctgcagatatcaagtgtgtcttggcagtcctgcatgtggagggcaatgcctgattgtctccagactgattaccccataagccttggctttcatcaaagaacaaggcttctagatgctctctgcccagtcactcaatgccatcactctgcctggccctgtgtttgccagggagcacagacacccatctgaggaatccatgccatgaggagtttatggtctgtgaagaatacaggcaggaatttgagaaggtgtcagactgcaggaaaggagctcactctgctggggtggatatctgaggcagagatctgctggtataggggaccaactggctaagtaagtttccccaagactcacggaatttccacaacaggtgatttaggatctgaaaacctgacaattatgggtacacatgaggggggcagcctgcacaatgttctccaggtgaggagactggtggttgagttgccctttgaaaggggtgggtagccccctgggttttctttccacacacccggactgggagctccctgggggggagcaggggaatcccctttctgggcccccggc

SEQ ID NO: 186 - DNA, 1043 bp, Homo sapiens
  CDS (245)..(604)
  misc_feature (1)...(1043): n = a,t,c or g
cgctgcccnaggatagcctgcggtaccggtccggaattcccgggtcgacccacgcgtccggtagccttcaggaatgtttcctcttttctgtggggttacctttgggttatcttctctattaagtgtggatccctgaaaaatggcataccctggtggtttttctagcccctgctgaaatcctttgaaggaatgtacttatttgtcaagattcgtctaaaaatgtggtctccagaaatgaacatagatgtgctgtgagctccttgcagttgtgattgcgacactgataattaagattggtttagttgttctgttgtacttcatcaaattgttgattcacattgaatttatcaaacgtcattctattctaaaatgtgaaagtatttttaacttaaatgtaggaattcgcatgtatccaggacaagtaaatttttgtgaaacattgcagatgttagatggatttgggagaattttccaaactaagtggacgaacttatatagctacataaatagtaattttaccaaatgttgcaagaactctggagttcttatggtagtaaaatgccggaaagaaaattctgcattgaaagaatgtctaactgcttaatacctgaaggaaaatatctctgagacttcctccagccttgtgatttgttggattaatataatttaactcctagaaagttgagataaatcgtatggatgataaaaagctataatgatccagccttttatgaagaatgcaaaatggaatacctgaaggaaagggaagaattcagaaaaactggaattcctacaaagaaaaggctacagaagcttccaacaagcatgtaggcagatactcaaatgacattcaggaactctaatattcatggaagtcattttatagtccttaaataatggactcaagcatatatgtttgctttaccttaattatggaaatattaactttatctgaaataaatattttatttgtaaacgcggccgcgaattcggatcctcgagagatctctttttttgggtttggtggggtatcttcatcgtcg

SEQ ID NO: 187 - DNA, 3405 bp, Homo sapiens
  CDS (136)..(2715)
  misc_feature (1)...(3405): n = a,t,c or g
caggtcccggtccggaattcccgggtcgacgatttcgtgcggcggcggcggcggcgtcggcgtcggcgtcgtctacctccagcttctcctccctcctcctccgtctcctcctctctctctccatctgctgtggttatggcctgtcgctggagcacaaaagagtctccgcggtggaggtctgcgttgctcttgcttttcctcgctggggtgtacggaaatggtgctcttgcagaacattctgaaaatgtgcatatttcaggagtgtcaactgcttgtggagagactccagagcaaatacgagcaccaagtggcataatcacaagcccaggctggccttctgaatatcctgcaaaaatcaactgtagctggttcataagggcaaacccaggcgaaatcattactataagttttcaggattttgatattcaaggatccagaaggtgcaatttggactggttgacaatagaaacatacaagaatattgaaagttacagagcttgtggttccacaattccacctccgtatatctcttcacaagaccacatctggattaggtttcattcggatgacaacatctctagaaagggtttcagactggcatatttttcagggaaatctgaggaaccaaattgtgcttgtgatcagtttcgttgtggtaatggaaagtgtataccagaagcctggaaatgcaataacatggatgaatgtggagatagttccgatgaagagatctgtgccaaagaagcaaatcctccaactgctgctgcttttcaaccctgtgcttacaaccagttccagtgtttatcccgttttaccaaagtttacacttgcctccccgaatctttaaaatgtgatgggaacattgactgccttgacctaggagatgagatagactgtgatgtgccaacatgtgggcaatggctaaaatatttttatggtacttttaattctcccaattatccagacttttatcctcctggaagcaattgcacctggttaatagacactggtgatcaccgtaaagtcattttacgcttcactgactttaaacttgatggtactggttatggtgattatgtcaaaatatatgatggattagaggagaatccacacaagcttttgcgtgtgttgacagcttttgattctcatgcacctcttacagttgtttcttcttctggacagataagggtacatttttgtgctgataaagtgaatgctgcaaggggatttaatgctacttaccaagtagatgggttctgtttgccatgggaaataccctgtggaggtaactgggggtgttatactgagcagcagcgttgtgatgggtattggcattgcccaaatggaagggatgaaaccaattgtaccatgtgccagaaggaagaatttccatgttcccgaaatggtgtctgttatcctcgttctgatcgctgcaactaccagaatcattgcccaaatggctcagatgaaaaaaactgctttttttgccaaccaggaaatttccattgtaaaaacaatcgttgtgtgtttgaaagttgggtgtgtgattctcaagatgactgtggtgatggcagcgatgaagaaaattgcccagtaatcgtgcctacaagagtcatcactgctgccgtcatagggagcctcatctgtggcctgttactcgtcatagcattgggatgtacttgtaagctttattctctgagaatgtttgaaagaagatcatttgaaacacagttgtcaagagtggaagcagaattgttaagaagagaagctcctccctcgtatggacaattgattgctcagggtttaattccaccagttgaagattttcctgtttgttcacctaatcaggcttctgttttggaaaatctgaggctagcggtacgatctcagcttggatttacttcagtcaggcttcctatggcaggcagatcaagcaacatttggaaccgtatttttaattttgcaagatcacgtcattctgggtcattggctttggtctcagcagatggagatgaggttgtccctagtcagagtaccagtagagaacctgagagaaatcatactcacagaagtttgttttccgtggagtctgatgatacagacacagaaaatgagagaagagatatggcaggagcatctggtggggttgcagctcctttgcctcaaaaagtccctcccacaacggcagtagaagcgacagtaggagcatgtgcaagttcctcaactcagagtacccgaggtggtcatgcagataatggaagggatgtgacaagtgtggaacccccaagtgtgagtccagcacgtcaccagcttacaagtgcactcagtcgtatgactcaggggctacgctgggtacgttttacattaggacgatcaagttccctaagtcagaaccagagtcctttgagacaacttgataatggggtaagtggaagagaagatgatgatgatgttgaaatgctaattccaatttctgatggatcttcagactttgatgtgaatgactgctccagacctcttcttgatcttgcctcagatcaaggacaagggcttagacaaccatataatgcaacaaatcctggagtaaggccaagtaatcgagatggcccctgtgagcgctgtggtattgtccacactgcccagataccagacacttgcttagaagtaacactgaaaaacgaaacgagtgatgatgaggctttgttactttgttaggtacgaatcacataagggagattgtatacaagttggagcaatatccatttattattttgtaactttacagttaaactagttttagtttaaaaagaaaaaatgcagggtgatttcttattattatatgttagcctgcatggttaaattcgacaacttgtaactctatgaacttagagtttactattttagcagctaaaaatgcatcacatattcatattgttcaataatgtcctttcatttgtttctgattgttttcatcctgatactgtagttcactgtagaaatgtggctgctgaaactcatttgattgtcatttttatctatcctatgttaaatggtttgtttttacaaaataataccttattttaattgaaacgtttatgcttttgccaacacatcttgtaacttaatatactagatgttaaggttgttaatgtacaaaaaaaaaaaacccttatactcacctgcgttttcatttgtttgacatttgtctattattggatatcattatcatatgaacttgtcagtgggaaacaaactgtctaaaaatttatctcttacgtttaacatacaatcatgtgagatttaggcagagttcgataaattactggcaaaaacaaaactcatttataaagattttctaatgttgactttaatactctaacatggtacaaaccanatggtaaaatc

SEQ ID NO: 188 - DNA, 902 bp, Homo sapiens
  CDS (257)..(430)
taccgctccggaattcccgggtcgacccacgcgtccggcattcagctaatttggggctaccagaaaatgctctgccaggcctcctggataaatggggagtcagccgtgacagctgccgcttgcaagtgtcttcattgtgccagtcgctcctcacacatcctttcatttaatcctcacattatgaggtgtaatgtctttaataagcttattttatgggtaggaaattagggttatgaggttaaatatcttgtcctagatgacaaagctaatgagtaatagaaccaggattagaacccatgtaaatctttgctgtttctgccgctacaccactcccaagatgagtttctcatctgcatgtgtgagcctctgcttaatgctgctgttttgttctcctccactcctgcttttgctcctgtcctcatttgtttaatgactgggttcatttccttgatcatatttttttttccttctcctatttgaatgatgggggcacagttggccagttctttgatactgagctgtaacaatcaccatccttgcttgaagaagtccttgcttctttgaatctctcatttggcttgacatcaaagctgaaaaaggttactgatgacggtatggaccttttcaatatgcaaattatgtaatggtacaaacgactttatatcagtataataaagtgcttaacgattcatttttattgctgcctgtccataccggaagctgtaaaatagaataatttaatttatgggaacgactcacatcttggaaaatgaagggggaaaaacctgaattccctagtggccacctctgccattagcctgggcacttcctgggggacagaggtggaaccccggcgggaaaggcttccccggcttctacaccggcccgcctgcaggttaacc

SEQ ID NO: 189 - DNA, 1877 bp, Homo sapiens
  CDS (37)..(1236)
gtaggcactgtgcaaaacatactagtggatatagagatgaataagaaaaagcccctgcactcaaagagctctcggattcatcaacaaattattgtgcagttagatagcctccctccacctgtcttctcagagcaggtaatggcaagcatggctgccgtgctcacctgggctctggctcttctttcagcgttttcggccacccaggcacggaaaggcttctgggactacttcagccagaccagcggggacaaaggcagggtggagcagatccatcagcagaagatggctcgcgagcccgcgaccctgaaagacagccttgagcaagacctcaacaatatgaacaagttcctggaaaagctgaggcctctgagtgggagcgaggctcctcggctcccacaggacccggtgggcatgcggcggcagctgcaggaggagttggaggaggtgaaggctcgcctccagccctacatggcagaggcgcacgagctggtgggctggaatttggagggcttgcggcagcaactgaagccctacacgatggatctgatggagcaggtggccctgcgcgtgcaggagctgcaggagcagttgcgcgtggtgggggaagacaccaaggcccagttgctggggggcgtggacgaggcttgggctttgctgcagggactgcagagccgcgtggtgcaccacaccggccgcttcaaagagctcttccacccatacgccgagagcctggtgagcggcatcgggcgccacgtgcaggagctgcaccgcagtgtggctccgcacgcccccgccagccccgcgcgcctcagtcgctgcgtgcaggtgctctcccggaagctcacgctcaaggccaaggccctgcacgcacgcatccagcagaacctggaccagctgcgcgaagagctcagcagagcctttgcaggcactgggactgaggaaggggccggcccggacccccagatgctctccgaggaggtgcgccagcgacttcaggctttccgccaggacacctacctgcagatagctgccttcactcgcgccatcgaccaggagactgaggaggtccagcagcagctggcgccacctccaccaggccacagtgccttcgccccagagtttcaacaaacagacagtggcaaggttctgagcaagctgcaggcccgtctggatgacctgtgggaagacatcactcacagccttcatgaccagggccacagccatctgggggacccctgaggatctacctgcccaggcccattcccagctccttgtctggggagccttggctctgagcctctagcatggttcagtccttgaaagtggcctgttgggtggagggtggaaggtcctgtgcaggacagggaggccaccaaaggggctgctgtctcctgcacatccagcctcctgcgactccccaatctggatgcattacattcaccaggctttgcaaacccagcctcccagtgctcatttgggaatgctcatgagttactccattcaagggtgagggagtagggagggagaggcaccatgcatgtgggtgattatctgcaagcctgtttgccgtgatgctggaagcctgtgccactacatcctggagtctgacactgagcccctgcgagtgaccgtgagcacacagttccgtagcggggcccatacgagactcgacgcgcgcgcaccacgaggtcccgagggaggacactcgacggacacgagtgacgggaaatgtgcatctacactagcgcgcgacagctagagcgatgacggcgaggacgtctcgcagcctaccagcaacgcgaagacgtgcctcccggcgtcgtatggattaacaagctccaagtagggtgtacaacgccgcagcatgaactcccagg

SEQ ID NO: 190 - DNA, 1667 bp, Homo sapiens
  CDS (539)..(682)
ccgtgcccggcctgtagaagatgcacatgtaagaaaaatctgattaggtaagaaaaaataaaaagacaaaacaagcctgccacccagagacgtacaacaaaatgcgaactgtagttatttttctagacctttggatagccattaatatggttccacgttaataacagtggaaccatactgtatgttctgtttgtgttttcagtggaaaaacattacagaaatactctgaacaaccttctgtcaagtaaatttttcgagaacttatatgattatagatctgaactaatttatttaatcaatctggtatttgccttcctttttattttctaggttctggcttttataaacattgaaaatatcctcataggtcagtctttgagtgttcttattttcttgggataaagtgaattgctgagtcaaaagaatttgctcattttcaatgcatttgatacatactaccacattgctttcagaaaagttatgctagttttcccaaccagcgtttgatgggcaaaaaaaacctggtgagattgaatttatgtttattgggcttggtatttcttttttaaattgcccctcgctttttgctcattttattctcttttgcccattgcccctctttgggatatttatctcttactggtttgtaagacttctttctattaatagaggttggaaatagcagttatctaggtttttaatgttggtttgataaacactgaattttacttagtttgcattagagagcttactgttaactcttaaacatttaaattccctgttctcagttctaattttcagtgtgaaatcaggtaagatacatttgcaggtgaaaaagtttgaaatgtaaaaagataaccaaattaatttaatatttccttgggaatttgattactttttctgggagaggagttctgggcaacaacataaatactgttatttgtggatatttgcaggttacgtttggtcttcaaataagtcaacattattttctttcacaaaacttggttttctggctttctataatttcccaattaacatttaaataaaagaccaaattaaacaattaaactttatttaatttggtcttttgtttaaatgctttgtggctacctagcttaccttttcagcttttaaggaaaaaaaaaatcagaactttttattttggttcggtcggagacagcctcactctggcacccagcctgcaatgcaagcgcgtgatcttagcttactggcacctctccttccagggtcaaaaaaatccccttgcctaagttccccccctaccccatcattgggattatagccaccggcgccagcccagctaattttgggtaccaggtttctcatttccttctggtggcgcgaaccccggccctaagacctccctctccggcgctaacggggggatccgcgacctctccctccttggcggccctccccccgtctacgtctccataagtgctgcctgcttgcgcggcccggccgccccacagctctgctcccctctggcgcgctgggccccgtcccactagaccgtataccttcttccctcgccgcctggccctcacaccgatcaccatccccgcctgtccgcgccgctgtgcgccgttctccatctactcatccccccctctctcccctattcacgcgcacggctcagtatc

SEQ ID NO: 191 - DNA, 1458 bp, Homo sapiens
  CDS (23)..(961)
  misc_feature (1)...(1458): n = a,t,c or g
tctgtatataactatctattcgatgatgaagataccccaccaaacccaaaaaaagagatctctcgaggatccgaattcgcggccgcgtcgacggattttcaggtgttttcatttggtgatcaggactgaacagagagaactcaccatggagtttgggctgagctggctttttcttgtggctattttaaaaggtgtccagtgtgaggtgcagctgttggagtctgggggaggcttggtacagcctggggggtccctgagactctcctgtgcagcctctggattcacctttagcagctatgccatgagctgggtccgccaggctccagggaaggggctggagtgggtctcagctattagtggtagtggtggtagcacatactacgcagactccgtgaagggccggttcaccatctccagagacaattccaagaacacgctgtatctgcaaatgaacagcctgagagccgaggacacggccgtatattactgtgcgaaatcccatccggggtattactatgatagtagtggttactcctactactttgactactggggccagggaaccctggtcaccgtctcctcaagtgacatccagatgacccagtctccttccaccctgtctgcatctgtaggagacagagtcaccatcacttgccgggccagtcagagtattagtagctggttggcctggtatcagcagaaaccagggaaagcccctaagctcctgatctataaggcgtctagtttagaaagtggggtcccatcaaggttcagcggcagtggatctgggacagaattcactctcaccatcagcagcctgcagcctgatgattttgcaacttattactgccaacagtataatagttatctacgtggacgttcggccaagggaccaaggtggaaatcaaacgaactgtggctgcaccatctgtcttcatcttcccgccatctgatgagcagttgaaatctggaactgcctctgttgtgtgcctgctgaataacttctatcccagagaggccaaagtacagtggaaggtggataacgccctccaatcgggtaactcccaggagagtgtcacagagcaggacagcaaggacagcacctacagcctcagcagcaccctgacgctgagcaaagcagactacgagaaacacaaagtctacgcctgcgaagtcacccatcagggcctgagctcgcccgtcacaaagagcttcaacaggggagagtgttagagggagaagtgcccccacctgctcctcagttccagccttgaccccctcccatcctttgggccttttgacccttttttccacagggggaccttacccctatttgcggtncttccaggttcatcttttcaacttnaacccccttcttncttcttgggttttatttattgttaatgtttggaggaggattgattaaattaagtgaatttttttgcanctgttaaaaaa

SEQ ID NO: 192 - DNA, 1497 bp, Homo sapiens
  CDS (206)..(1159)
gccatgtcactggctcaggctcagctgctgggtcaccaggagaatggacgcttcctccacctcagctcagagcacagtgatgattcgtgactttcccaatagaacttcaaatctctgaagacggggggtggggggatgtgcttgagtgtttgtactcatggtcttattctcggagtgacaaagctggaacacaatacctctatgcatgaaaaggttgtcacttgtcacaactaacaggctttcacctcatggaaatttttttaccttgtgtacttttcccctggcagtggacatggctgcactcttccaagaagcaagcagctgtcccgtctgctcagactatctggaaaaaccaatgtccctggagtgtggatgcgccgtctgcctcaagtgcattaattcactgcagaaggagccccatggggaggatctgctttgctgttactcttccatggtctctcggaagaacaaaatcaggcgcaatcggcagctagagaggctggcttcccacatcaaggaactggagcccaagctgaagaagattctgcagatgaacccaaggatgcggaagttccaagtggatatgaccttggatgccaacacagccaacaacttcctcctcatttctgacgacctcaggagcgtccgaagtgggcgcatcagacagaatcggcaagaccttgccgagagatttgacgtgtccgtttgcatcctgggctcccctcgctttacctgtggccgccactgctgggaggtggacgtgggaacaagcacagaatgggacctgggagtctgcagagaatctgttcaccgcaaagggaggatccagctgaccacagagcttggattctggactgtgagtttgagggatggaggccgcctctctgccagcaccgtgccgctgactttcctcttcgtagaccgcaagttacagcgagtggggatttttctggatatgggcatgcagaacgtttccttttttgatgctgaaggtggttcccatgtctatacattcaggagcgtatctgctgaggagccactgtgcccatttttggctccttcaattccacctaatggtgatcaaggtgtcttgagcatctgtcctttgatgaactcaggcactactgatgctccagtccgtcctggggaggccaaataagccctcactccaaaaaaaacaaaaaacagggtaagaaaattacttgggtgggtagacttaggaacactctacttcgtaaaagcattatacaaagtcacgggagaaaaatatgggacatttcttgattatacttaatctaatttgattagattatagagtcctaagtattaattattgccaccatcaaactcattgagtcctatggttcacatcttgtttcctatagaaatgtcctgtattctgggatcaatttccaaatgctttacttttttatttctgcaagttcaaattaatgtcttatagaagttatgagttaaataaggtatggaatatcaaaa

SEQ ID NO: 193 - DNA, 775 bp, Homo sapiens
  CDS (49)..(687)
  misc_feature (1)...(775): n = a,t,c or g
gagaactctgaggaatntcgnccangnacggcgccgcagcacttcgagatgtatcgcctgagctcatcaatgctgttacgggctttggcccaggccatgcgcacaggacatcttattggacaaagccttcatagcagcgcagtggcggcaacgtacaagtatgtgaataagaaggaacaggagtctgaggtggacatgaagtccgaaactgacaatgcagctcggattctgatgtggacagaactcatccgaggactgggcatgaccctaagatacctctttcgagagcctgccaccatcaactacccctttgagaagggcccactgagtccgcgcttccgtggggagcatgcactgcgccgctacccgtctggggaggagcgttgcatcgcctgcaagctctgtgaggccatctgtcctgcacaggccatcaccattgaggctgagccaagagcagatggcagccgccggactacacgctatgacattgacatgaccaagtgtatctactgtggtttctgccaggaagcctgccctgttgacgctatcgtggagggccccaactttgagttctccaccgagacgcatgaggagttgctgtacaacaaggagaagctactcaacaatggtgacaagtgggaggccgagatcgcggccaacatccaggctgactacctgtatcggtgaccgggccaccggtgaccttgccacctggccagccttgtggcccctatagcccataaagaaactctgatcccaaaaaaaaaaaaaaaaa

SEQ ID NO: 194 - DNA, 874 bp, Homo sapiens
  CDS (60)..(269)
tacgtccagagtggaggaattcccttttcatccttgtcttcttggattctttggcgcttatgatagagttggcttttgcctcattcttaaaatgtgcttcattttctttggtgatactggtctcttttagtttcccactttggtttttcctcagctgctttgcatgctcttactcattttcctgcctcttaagtagaatttcaatccttagccccttttgtcaccttcttcctaggcaatcccatgacctttgtactaatgatttgtaaatctctagtcccagcctaggcctttgtgtaaactcctccattaagtgcctactaggagatctgcatgcctagatgttctaatgtgatctcaaactgaacatagtcaaaactcaactccctgtcacccctgtcatgccatccacaccatgccgtgctgcaccctgtcataccgcatgagccaccagaccgtcatgctctgtgacttgtctgtctgcccaattctattttgagcttcttgagggcagggatctcattttttatctctgtatcttcagtggccggcacattgagcctgctcaatgaatgcgtgagagaatggaagtacggaagaagagcgacagcctgacagcgccccaaatgttgctccttactctaaggcctgctgatcacacccaccaaaaactcatgaggcccgtcgaaatgggtctagccctgacaaggggactttttaattcaccggcgcaccccatctcgccctccaggacggacggatgatcgcacctcccccctctcgggctggcacccaacgggctttacgcctggtcgtgcacccaacatcctatgtcccgcccccccccgcggcatttcccccccccgcagacccc

SEQ ID NO: 195 - DNA, 844 bp, Homo sapiens
  CDS (209)..(397)
cccgcggtggaattcattagaggaactcattaaatcttttggaccaagagctaacactgaaccctagaactacctggtttcatgaatgccaaaagagatatttttagtttcacatttgtttaatgaacacaggccctggaaccatcatctgagtatagtaatttgagatataattttaagattactggaagacagtgtaataggcttgatgtctgtcctcatctggtgtttgatattctttcctcttgagtattccaggcccaagagaggcttgaaagttgataatgtgtgtttttccactgttgccctttcaacagggtctagaatttccaactggtctaactgtgaaacttgtcttcttgctgaaatgtttttccttgatttggggttttcttgaaattattgccaaagtcatatgacataaattgtaaatgccacaaaatttattctgctattcttgagataaaacatggaaatctgaaagttgaaggctaggacttgggaagagaacttaagaagctaccatttcaaaatccttaatgaagggattatattacctgcttgctttgaccttgaaagtctcttgaatgatcttgttcatctgtcagacaatccctgcgtcaatgattaataaaaacactctagcctgagggtgggcttgtgctgaaacactgagggaggcaaagtgcagcaggaattataacttgaattccaaacccagactatgcctagagcaagggttctccaccctggatgtgtcacaagccagcaggatgctttcacccccccccagcaacaccaagggaccccccccaaccaccagtggcacccatcaagccccccc

SEQ ID NO: 196 - DNA, 1672 bp, Homo sapiens
  CDS (60)..(1016)
cctgcggtaccggtccggaattcccgggtcgacccacgcgtccggtgcccgcttccaaaatggcggcggcggcggtatctggtgcgcttggccgggcgggctggaggctcctgcagctgcgatgcctgcccgtggcccgttgccgacaagccctggtgccgcgtgccttccatgcttcagctgtggggctaaggtcttcagatgagcagaagcagcagcctcccaactcattttctcagcagcattctgagacacagggggcagaaaaacctgatccagagtcttctcattcaccccccaggtatacagaccagggcggcgaggaggaggaggactatgaaagtgaggagcagttgcagcaccgcatcctgacggcagcccttgagtttgtgcccgcccacgggtggacagcagaggcgattgcagaaggagcccagtctctgggtctctccagtgcagcagccagcatgttcgggaaggatggcagtgagctaatactgcattttgtgacccagtgcaatacccggctcacacgtgtgctagaagaggagcagaagctggtacagttgggccaggcggagaagaggaagacagaccagttcctgagggatgcagtggaaaccagactgagaatgctgatcccatacattgagcactggccccgggccctcagcatcctcatgctccctcacaacatcccgtccagcctgagcctgctcaccagcatggtggatgacatgtggcattacgctggggaccagtccactgattttaactggtacacccgccgagccatgctggctgccatctacaacacaacagagctggtgatgatgcaggactcctctccagactttgaggacacttggcgcttcctggaaaaccgggttaatgatgcaatgaacatgggccacactgccaagcaggtaaagtccacaggagaggcactggtgcaaggactcatgggtgcagcagtgacgctcaagaacttgacaggtctaaaccagcgtcggtgagaggaaggggtataagctacaatgcctagaagagaatgagcggacagattgaaagagctttgaaaagtataaggtgccatccacataacctggtgttcacgagaacacactaaaggactcctgagtcactaccacagccacctggaaaccacaaggcatttgatgctaccgttctggtcagggattgggctgcttcttcagttcctaataccagaccaagcctcctgatgcctttctgcactgcaactgtgtgattgaaaaatgagatgttcatccaagcagtcaagccacagaaacccagcatgtccctgtcacaatctcatgggcaccttgatcatgtcttaaccttcccttaaccttggggctcccaagccagagtcaaggtctgacgccacctcaaggtgacagctcatctccagcacagcacaggcgtgtgcacacagaggtgttccttgcagccccctccctctcaggtgtcctgagatgctgctcctgggagccccctcagaaaactgcctcacctgagacaagtgcctgctggacagaggtgtgattccaggcctggtgtcacatgacaccagcatgcattgcaggattattagtgtattttgagtctgtaaaaataataaatatgtttgaagtagtaaaaaaaaaaa

SEQ ID NO: 197 - DNA, 934 bp, Homo sapiens
  CDS (127)..(294)
tatcgtcgtaaacatcactacgcctagcttggcacgagcctaatacagaccctatctcaaaaacaaacaaaaagagattgctcattggcacttggtccctgaatgtgctaatgagatgtggcattcatgggccatctgctgtgtgtgtggggttttacatacatccttccttgtatatccttaaggcattcacctcttcagcctccaggatgggaaggtttttgcaggaatgtatcttttcctctcttgagggcctcacttgctcctcaccataggaggaaggacggatttatctgattggagagactgtaaataaagactgactggaacatatggaccaggggcgggtctgctgcatggacgttgggctgtgtgggttgctcactctcctgccctcttcttgcctatgcagaactgatttctcacctctgccttcctgtctgttcctggtgggttaggaacgtacaggagagaagggatgaagattagtttctcttaccccctgaagcattatttttcacagggcctctccacctgttcagtgttgagtaagtgctgaatgagtggacagggaaacagccttggaaaagcttactatcccgcacatccctactaagtgatggcaatgaatcaggggagccgggtgtccacaccccaagcgcccacccttggtgggttgtaagaatcccctggttagggagggcatgacggtaaacatctccctccgggttattccctgccatctggctggtttgatcccccttctaatccccctggggggggttccccccttccaatcaggcttgggggaccacaggggccctttggtttactaacctgggccctggccacaaccgttattttatggggacccccgaagccatggggcccaacccttttgggccctctttttctcaacattcatatgcgtgcc

SEQ ID NO: 198 - DNA, 814 bp, Homo sapiens
  CDS (232)..(483)
  misc_feature (1)...(814): n = a,t,c or g
tgattcactggccggcgggactgggagaacattgtttattctattgacaatactttcccaccacgagggcaatacccttctgagtacttgaccaatgctctttgaatttcagggcttcccaatttgaatagttttcaaatctcagttttaccagtccagtttgaactttaaagactattcctactcatcttttcagctggtttttcatttgattttataccatttcctcacatgcatgtactgatcagaactccctgctctctaatactctgcctggcaaactctagccacgctagtctacctggattctctgcttcatcttttctatttaaggagtcttgcagactccttctgaattcttcctttctgctgcatggcctagaaattctctcaggggcaattgcaggcaaatgcaactcattttgtttgttttccatctctcagggatcactgtccttcaatgcctcatgcccgttgccttgaaaaccattgtttaatatattcatctggacttttaggtgtgggcattggaaagataaatctagccccccgggattccctcttgggccgagagcagagattctgccacatattggtgaaaccctttttggggggggcgccgcgcgattgtacaaaccactaggcgcgtcacaacaacgagaagagggaactctgtgggatctgagtcgcggggnngcgaccccgcgagccgaccccaccccgggccggccccgcgcgtcctccacgacacatggagcaggcgacgggtagctagtgcgacgggcacatatggcccgaggaggacgacggcgac

SEQ ID NO: 199 - DNA, 765 bp, Homo sapiens
  CDS (33)..(458)
  misc_feature (1)...(765): n = a,t,c or g
gacggaggtgcgccaaggatccccgtggccatatggcgcgtccgactagcagtctatgcctgcttctctacttcttctctactggtaaaagcgtgcctgtatccatcttacccggcgttgtgcgcatgctgctgccaccgcctcctcatcttctgcccggccaaccggcctgccccgctgcagtgatgtgcgacaaggagttcatgtgggccctgaaaaacggagacttggatgaggtgaaagactatgtggccaagggagaagatgtcaaccggacactagaaggtggaaggaaacctcttcattatgcagcagattgtgggcagcttgaaatcctggaatttctgctgctgaaaggagcagatattaatgctccagataaacatcatattactcctcttctgtctgctgtctatgagggtcatgtttcctgtgtgaaattgcttctgtcaaagtgagctccagtgctgtgaatctctgcttaaagcaccatatgacattcacctgtaatcccagcacttcgaaaggccaaggcgggaggatcaattgagcagcctgggcaacatagggagacctcatctctacaaaaaataaaaataaattagccaggtatggtggtgcatgcctggngtcccagccactactcaggtggttgagttgagaggattgcttgagcccacggaattgaggctgcagcgagtggtgatcacaccactgcactccagcctgggtgacagagtgagaccctctctctaannaaaaaaa

SEQ ID NO: 200 - DNA, 703 bp, Homo sapiens
  CDS (227)..(376)
ctaattttggttatattatgcggccttggataaggaagtttcttaggctttcatattccaaattattggactattctaaaaacatttttaagtattttgatggatgtagtctattctaatataatgtctttcaagtgtttgaaagttactacttattcaaaactcaactgtctggcagcttttcttatcctgaactctgtgaagaacttcagggacaggaggtaaaatgtctttgaagagtaagaaatccaaaacttcatgtatttacatgttctggtcttgtctcataggattcttctttctccttacataccctcctttaaatccgtacctcccccggtcttctccatcttgcaaatggcaccaatgtccatcctagacattgatcatcccagaagtctaggagttgattcttctcatttttttagttctgttgcgcaagccctcaccttttgcccgtttgccctcaggccttttaacaactattccttacagagaccggttttccaaaaggcccccgcattccatcatttcctggtgaaaaaattttaatgggatcctcaccccctctggatggtttaacccctcgagacccccgggaatgttgccttgccttgccttctgttttaattcgaaaaaccttgcttccctcagacggggggggaataaaagttttgggggccccccccccccccccccccct

SEQ ID NO: 201 - DNA, 746 bp, Homo sapiens
  CDS (65)..(337)
atttggccctcgaggccaagaattcggcacgaggatttgaccttcttaaatgtgaacatttcatatgttccttgtgttttgtaatataattactgtcatcaccatgacatctttatttcttattcttctctcatgtatatttattttgataacctgttgctataaatgtagatacatttctttctcctttacattttccgtcacaccctccggtttctttgttagcatcctccagtatcttgcccacattctcctacttattactcttcaattccatttcagagtctgttacgtgaacataattacccttatccctcttgcacaaatctttctttaatctgttggatgactctgaaaggattagtttcagtttggggcttgagctgtgtccagacacacaactgctattagttcctaccatagttctacctgggtcagaagaatgagaaaaataatccttactttttcctcctctatgagcaggaggtgcttactttttactgatttgaccagctgaacattttaagataatattcagcactgtagatgaagattagaaattactgcgcaaactttaagtgagaataaaagaatttgtggcgttctacgagactctaaacacactatcttccctattgtctccttaattcaaacaagcatttgggcttttttcttcattccactcgacccctccccgaagctcaccgcccttcgcccctccccgcgtccccccttccaccctctcc

SEQ ID NO: 202 - DNA, 824 bp, Homo sapiens
  CDS (527)..(775)
gggctcgcgcgggggccggtgtagagggggaagggcgagaaggggggggggggagtgaagcaatgggggagatggcgaggcggtgcagtgggtggggaggccggctggtgggcgcggtggggcgaggaaagggaaggggggtcaggaggggtggggtgagggggcaagggcagggggtgtgcgcccgaggtgagggtgtggcagggaggggggcggggcggacgcggggataaaaggacggagggatggcggcaggtgttggggttgggcagttgcgatgggggtgtggtcatgtggcagtgaaaagtagagggagaaagatctcggcgcttggcaaaggcgctggtaactagttttctagtagtctgtgcactgtgctttcatagagccatctgtaatctatcttttcttggcatctgtgacgctggggttattttctccccacactttgtctgctctgacccttataatgaaaccaaaggttaaatgtagactcactcaacacccacaacattaaaacaattggatggaaaataatctcatcttgacatgctgggggagatgtgctgcacacccagtagagttaatgggagttacagccaaaaccaaggtgaagcctctgctcccaagggcacaaaagcaaagagaagaacaggggaagtttaaattcaaaaaaccccatagctgcataaagaagtctaggaacctgagttctagactttgtgaaaattatgtatgttggaaactggtctctagccctagacttggacaaaagtagaactagctcttccctcgtgccgaattcttggcctcgagggccaaat

SEQ ID NO: 203 - DNA, 810 bp, Homo sapiens
  CDS (175)..(405)
atttggccctcgaggccaagaattcggcacgagactactttgccgctacacattcttagtgaatagcctccttggcatgtttttgaaaacttaaatgttgctggtaatcatgtcacagcaatctccttggagagcctttgtgtcctgttctcagaagaaatatgccgtttttccatgttaatggttttgaaattagtgatttgctctattttcattggaaaggaaggtcactttgtgatttcctaccttccctcattttctctgaacattcaggatactcttaagtcagttcatcagccatgcagtgcactgtctggttataacatgcctgaaaagccagaggaatgttctatcaaagagcggcatccctattctcagagactgttcttagaattcaaagtgtaaagatctaactcagagaggaaagttcctggacagaccattattgccattttttttcccgtttcagtcactgaccgccttggattgtccattcattggtctcattagagaaggctgtgctccccacgtattaagcctctcacagaggacatttaaaaatcctttctgaagcagattcactcatgtaaaactaaggtcagacttatggatcctggaccagcattaatgacgcagaactctgtgggaacagaaagacgtctagccattctcagttctttggggggggtcccccaaatttagggccctgggggttccccctggaagagcccgccccttgaatctatggagaaaagcgggctaggccccctcgggttcttcccccccccagggggggttttggcgacatcc

SEQ ID NO: 204 - DNA, 743 bp, Homo sapiens
  CDS (224)..(514)
atttggccctcgaggccaagaattcggcacgaggaatattccttttttaaaacatactttaaaaaatcttttcttacctgtgaaagcttatggcacatagtaggcatttagcaaatgttggtttccttccttttagaccgacatttggttgggactggttttaactaccttgaggacttttcttatctcacccatctcaaatgtctcctcccctgtagggtgtatgggcatcagctgcaagttgcttcttctgactagagtctgctacctgatcaccccgttagatcttgagaggtttcccttcccaaacactgagcaggtgacatttccggaacgcagagttagcgtcttcctgctgcctctgagctggtgtttggacacaaggctgcccagagagcctggctgcaggtgtcgacacagctctccacaggacgtggttggcggcagtcacctggtcaccacaactcttctaagcctcccagctcgggaattctggacctcttgcatcctctaaattggatgctgtctgatatttccaaaaggataccatgcttgatgagatcaaaggaggagaggatgactcagaaaagacccagaagagctcacagtgctcttagcaggatgcttagtgacatggagtcctctgacagcaatagtgcttggagacatttttacacctatggccacagggcccatgcatacaccccccccccccccccacacaaaacctggtgaccaaaggg

SEQ ID NO: 205 - DNA, 809 bp, Homo sapiens
  CDS (284)..(421)
atttggccctcgaggccaagaattcggcacgagagtcataatatatctgtctggaacatagtagattcttaataaatattggaatgaaagtttaatgctttgaaaaaggcttcttttacgtctactaaagttctagctcaggatactgtaggggttttatttacttttttttcctcttcatgaaaatctagactcttaaaatccagtatctttagtagataatttgcatttatttattatccaagttttacatcttggcgtttttccagcagtgatacctctcatgattctgttccactgtgagaaattatatgcacttagaagctttgatttctggttcatgttagaacttctcagtacatggcccagggctttggggctgctgtgtcctggtctggccattgaggctcatgaaggctgaggcctctgggcctgcctcccacatgcagaggaggcaggtgagagctggagggcctccctgctgggcaaggtgaccagtacacagcattttccttcccatgaggattaaacaatcactgggaaacattcctatatctaaggaattatgccttattaaaggaatctttagtaagtactcagcttcatgagcagatgatccaaaaagatgactctgaattaaattttttattcctgagggccttattaaataccagtgcagcgtatgagcaacagggcatagcagctttttttgggtgatattatttggttaaatcaattactaataccagactactggattccttaataatggtttgggggaaggcaggtaccttggggagtggcttggg

SEQ ID NO: 206 - DNA, 624 bp, Homo sapiens
  CDS (29)..(265)
cgaatatgttcaggaaaaatctttaattatgaaaactctgaaaatcttcacatactattttttatccctttctaacatctttatattgacgattggcctgacgtgtgcctctggcccccttgactttacccctgtgtttctgcttggaaagggctccctgaagtgcaaatatggtcctgttgcacatttgccccctgaagctctggaaagcggtccccaaatcccatccggatgtaactggaaggaaattccaacatcctcctagtccagccgagggggttcccaccacggatttccttttcagggctcccattgcattactggacaacttctaactattgaaaattttccattgggagaattctccgtgtgtcatttttctgtagttccatttaatgcagtgatagttattttttatcttctgtgttttctctacttcctgattaaattatgacctcctcaaatggaagggcaatataaactcatttctttttattatcccacagtaattgtcaggctcagacttctctgtgagcatcaccgactgaccagggtaccgctggctgggatgttacatggagcagttacactagcattttagtttcaaatggatgcagattcagc

SEQ ID NO: 207 - DNA, 863 bp, Homo sapiens
  CDS (387)..(542)
ccaggtgaggcacaggtgggtctgcaaggccccttgagctccaagcacctgcatgtgtctaggcaaaacctccagcacatcggtattcccttgtgaagtacgtaaagccacagattaagtggggatggatctctcgcctctgcgttcaagggggcaaatctccaggataaatgcccccttttcctacaccattttccaccagccttggagagtcagcttcccatggcttccttccaacggaagcaggagaaagggctgggctagttaaaccgcagcactttcagttttagggtgtgtcgtgtaggttagtgatttgtgctctgcagagactctccagggagagcaaaaagagcaggtggaatcatcagcttggccagaagacgcagatgacgccccgtgagccagctcaggaaagacggccccaccttgaagggcccacgctgaaagccagtgatggggagacgtggtgtgaactgagaggtgatgagatgcgtagatcatctgccccctgcctggtgggcagccctggccccacgtgctgacccaggcacagaaaagccacatacgtgtactgggcacgctctatggaagaacggtgaattgttgctctggcaaataatatccagcagagatcagtgggcccagggtgcactggtaagaaatgggttccagtcgattcctgtgtggttttgaggatcatggtgagctaggatctaccaaagcagctgtttacaaagtggtgaccatgctgacagcagactcaagagagggtgtggggccgggtgcggtggctcacgcctgtaatccttggccttgggaggccaaggcgggctgatcgccgggtaccgagatcgaattgggaa

SEQ ID NO: 208 - DNA, 1763 bp, Homo sapiens
  CDS (66)..(1232)
acggaattcccgggtcgacgatttcgtgctgaaaatctgggtcacagctgaggaagacctcagacatggagtccaggatgtggcctgcgctgctgctgtcccacctcctccctctctggccactgctgttgctgcccctcccaccgcctgctcaggactcttcatcctcccctcgaaccccaccagccccagcccgccccccgtgtgccaggggaggcccctcggccccacgtcatgtgtgcgtgtgggagcgagcacctccaccaagccgatctcctcgggtcccaagatcacgtcggcaagtcctgcctggcactgcacccccagccaccccatcaggctttgaggaggggccgccctcatcccaatacccctgggctatcgtgtggggtcccaccgtgtctcgagaggatggaggggaccccaactctgccaatcccggatttctggactatggttttgcagcccctcatgggctcgcaaccccacaccccaactcagactccatgcgaggtgatggagatgggcttatccttggagaggcacctgccaccctgcggccattcctgttcgggggccgtggggaaggtgtggacccccagctctatgtcacaattaccatctccatcatcattgttctcgtggccactggcatcatcttcaagttctgctgggaccgcagccagaagcgacgcagaccctcagggcagcaaggtgccctgaggcaggaggagagccagcagccactgacagacctgtccccggctggagtcactgtgctgggggccttcggggactcacctacccccacccctgaccatgaggagccccgagggggaccccggcctgggatgccccaccccaagggggctccagccttccagttgaaccgctcactcagtggtcagcgtttcctgcacactttacctctcatgtgcgtttcccggcctgatgttgtggtggtgtgcggcgtgctcactctctccctcatgaacacccacccacctcgtttccgcagcccctgcatgctgctccagaggtgggtgggaggtgagctgggggctccttgggccctcatcggtcatggtctcgtcccattccacaccatttgtttctctgtctccccatcctactccaaggatgccggcatcaccctgagggctcccccttgggaatggggtagtgaggccccagacttcacccccagcccactgctaaaatctgttttctgacagatgggttttggggagtcgcctgctgcactacatgagaaagggactcccatttgcccttccctttctcctacagtcccttttgtcttgtctgtcctgggctgtctgtgtgtgtgccattctctggacttcagagccccctgagccagtcctcccttcccagcctccctttgggcctccctaactccacctaggctgccagggaccggagtcagctggttcaaggccatcgggagctctgcctccaagtctacccttcccttcccggactccctcctgtcccctcctttcctccctccttccttccactctccttccttttgcttccctgccctttccccctcctcaggttcttccctccttctcactggtttttccaccttcctccttcccttcttccctggctcctaggctgtgatatatatttttgtattatctctttcttcttcttgtggtgatcatcttgaattactgtgggatgtaagtttcaaaattttcaaataaagcctttgcaagataaaaaaaaaaaaa

SEQ ID NO: 209 - DNA, 1400 bp, Homo sapiens
  CDS (288)..(1301)
  misc_feature (1)...(1400): n = a,t,c or g
ggtctatagcatcacgctacccgntctttttgnaagatcccatcgattcgaattcggcacgaggtcacgagcccgcaagaagtctcgtatcgcgcccgggaggcgccggagcccagcggctggcgccagatccaggctcctggaagaaccatgtccggcagctactggtcatgccaggcacacactgctgcccaagaggagctgctgtttgaattatctgtgaatgttgggaagaggaatgccagagctgccggctgaaaattacccaaccaagagaaatctgcaggatggactttctggtcctcttcttgttctacctggcttcggtgctgatgggtcttgttcttatctgcgtctgctcgaaaacccatagcttgaaaggcctggccaggggaggagcacagatattttcctgtataattccagaatgtcttcagagagccatgcatggattgcttcattaccttttccatacgagaaaccacaccttcattgtcctgcacctggtcttgcaagggatggtttatactgagtacacctgggaagtatttggctactgtcaggagctggagttgtccttgcattaccttcttctgccctatctgctgctaggtgtaaacctgttttttttcaccctgacttgtggaaccaatcctggcattataacaaaagcaaatgaattattatttcttcatgtttatgaatttgatgaagtgatgtttccaaagaacgtgaggtgctctacttgtgatttaaggaaaccagctcgatccaagcactgcagtgtgtgtaactggtgtgtgcaccgtttcgaccatcactgtgtttgggtgaacaactgcatcggggcctggaacatcaggtacttcctcatctacgtcttgaccttgacggcctcggctgccaccgtcgccattgtgagcaccacttttctggtccacttggtggtgatgtcagatttataccaggagacttacatcgatgaccttggacacctccatgttatggacacggtctttcttattcagtacctgttcctgacttttccacggattgtcttcatgctgggctttgtcgtggttctgagcttcctcctgggtggctacctgttgtttgtcctgtatctggcggccaccaaccagactactaacgagtggtacagaggtgactgggcctggtgccagcgttgtccccttgtggcctgggcctccgtcagcagagccccaagtccaccggaacattcactcccatgggcttcggagcaaccttcaagagatctttctacctgcctttccatgtcatgagaggaagaaacaagaatgacaagtgtatgactgcctttgagctgtagttcccgtttatttacacatgtggatcctcgttttccaagaaaaaaaaaa

SEQ ID NO: 210 - DNA, 1062 bp, Homo sapiens
  CDS (128)..(544)
  misc_feature (1)...(1062): n = a,t,c or g
gcacgaggcggatggggaaacaattgagattgagggaggcaggcagagcggagcgaaaacaggaggacagaaatagcgaagcaaggccaagatcgggacccccaccagggaggtgcccagtacagacatgaaagtaaggcggggaagcagctcaagcctcacccaccgccctgcccccagccccgccactcccaggctcctcgggactcggcgggtcctcctgggagtctcggaggggaccggctgtgcagacgccatggagttggtgctggtcttcctctgcagcctgctggcccccatggtcctggccagtgcagctgaaaaggagaaggaaatggacccttttcattatgattaccagaccctgaggattgggggactggtgttcgctgtggtcctcttctcggttgggatcctccttatcctaagtcgcaggtgcaagtgcagtttcaatcagaagccccgggccccaggagatgaggaagcccaggtggagaacctcatcaccgccaatgcaacagagccccagaaagcagagaactgaagtgcagccatcaggtggaagcctctggaacctgaggcggctgcttgaacctttggatgcaaatgtcgatgcttaagaaaaccggccacttcagcaacagccctttccccaggagaagccaagaacttgtgtgtcccccaccctatcccctctaacaccattcctccacctgatgatgcaactaacacttgcctccccactgcagcctgcggtcctgcccacctcccgtgatgtgtgtgtgtgtgtgtgtgtgtgtgactgtgtgtgtttgctaactgtggtctttgtggctacttgtttgtggatggtattgtgtttgttagtgaactgtggactcgctttcccaggcaggggctgagccacatggccatctgctcctccctgcccctgtgggccctccatcaccttctgctcctaggaggctgcttgttgcccgagaaccagccccctcccntgattttaggggatggcgtaggggtaaggagcaaggggcagtggtnttcaagtngttttnggtt

SEQ ID NO: 211 - DNA, 1881 bp, Homo sapiens
  CDS (179)..(1327)
  misc_feature (1)...(1881): n = a,t,c or g
acgcgtacggcttggctgtgtttatctcgttggggactaaggcgtcggttggcgcgcaacgggttctaggctgcaggcagctcgaggacccgcggccccgccccggctcggcctggcagatagcagaggcagcaggccgtgccgggggggcatgttgctgtaaccagtggcccaggggatgttacggtggacagtgcacctggagggcgggccccgcagggtgaaccatgctgcagtggctgtcgggcatcgggtatactccttcgggggttactgctctggtgaagactatgagacactgcgtcagatagatgtgcacattttcaatgcagtgtccttgcgttggacaaagctgcccccggtgaagtctgccatccgtgggcaagctcctgtggtaccctacatgcgctatggacactcaaccgtcctcatcgacgacacagtcctcctttggggcgggcggaatgacaccgaaggggcctgcaatgtgctctatgcctttgacgtcaatacgcacaagtggttcacaccccgagtgtcagggacagttcctggggcccgggatggacattcagcctgtgtcctaggcaagatcatgtacatttttgggggctacgagcagcaggcggactgtttttccaatgacattcacaagctagataccagcaccatgacatggactcttatctgtacaaagggcagccctgcacgctggagggacttccactcagccacaatgctgggaagtcacatgtatgtctttgggggccgtgccgaccgctttgggccattccattccaacaatgagatttactgcaaccgcattcgagtctttgacaccagaactgaggcttggctggactgtcccccgactccagtgctgcctgaggggcgccggagccactcggcctttggctacaatggggagctgtacatctttggtggttataatgcaaggctgaaccggcacttccatgacctctggaagtttaatcctgtgtcctttacctggaaaaagattgaaccgaaggggaaggggccatgtccccgccggcgccagtgctgctgtattgttggtgacaagattgtcctctttgggggtaccagtccatctcctgaggaaggcctgggagatgaatttgaccttatagatcattctgacttacacattttggactttagccctagtctgaagactctgtgcaaactggccgtgattcagtataacctagaccagtcctgtttgcctcatgatatcaggtgggagctgaatgccatgaccaccaacagcaatatcagtcgccccatcgtctcctcccatgggtaggaggaagtttctgccacctcccctcctgagcctgctgtcatcttcactgcccctgcccatctgtcacccacctgctcctttgacccctggacttggtatacctccatgtggagttgttgggcgagaggtgttctctgtgctgtgaattcagtggggagctgtagcggggtgggggctaggttcctccccccttgggccgagggccccttccccttgggtgctctgtccccatccacctcctttcagctgctcctgggcctcagcttctgcccagggccagcccaggttctgctgggaagggaagggaatggggagaaagggagaagcaagcagtgtctgagcctcaggaagcttcccctcccccttgcctatcccctcccctctgcttgagccttgagccttgactgggagctgaaaggagttgcagctgttggcatgagacctccttctccccgtcttggggaggtggggaccagcagataaatcccacccttcctttgantgtcgctgtactctgaagttcagctagctcagattttataaaaaaaaaaaaa

SEQ ID NO: 212 - DNA, 1726 bp, Homo sapiens
  CDS (216)..(1502)
ccgcggtaccggtccggaattcccgggtcgacccacgcgtccgcgtcgctgttgctgccgccatacgcgctctccctgtttagctcttctgttagaaatagtatctttgttttcctttgctgttcctcaatcccctactcttcaccccttgttttcacctattttgcgagaacccatccagatcccccttcccttcttcccctgccggcccagttatggcagagaacgatgtggacaatgagctcttggactatgaagatgatgaggtggagacagcagctgggggagatggggctgaggcccctgccaagaaggatgtcaagggctcctatgtctccatccacagctctggctttcgtgacttcctgctcaagccagagttgctccgggccattgtcgactgtggctttgagcatccgtcagaagtccagcatgagtgcatccctcaggccattctgggaatggatgtcctgtgccaggccaagtcgggcatgggaaagacagcagtgtttgtcttggccacactgcaacagctggagccagttactgggcaggtgtctgtactggtgatgtgtcacactcgggagttggcttttcagatcagcaaggaatatgagcgcttctctaaatacatgcccaatgtcaaggttgctgttttttttggtggtctgtctatcaagaaggatgaagaggtgctgaagaagaactgcccgcatatcgtcgtggggactccaggccgtatcctagccctggctcgaaataagagcctcaacctcaaacacattaaacactttattttggatgaatgtgataagatgcttgaacagctcgacatgcgtcgggatgtccaggaaatttttcgcatgaccccccacgagaagcaggtcatgatgttcagtgctaccttgagcaaagagatccgtccagtctgccgcaagttcatgcaagatccaatggagatcttcgtggatgatgagacgaagttgacgctgcatgggttgcagcagtactacgtgaaactgaaggacaacgagaagaaccggaagctctttgaccttctggatgtccttgagttcaaccaggtggtgatctttgtgaagtctgtgcagcggtgcattgccttggcccagctactagtggagcagaacttcccagccattgccatccaccgtgggatgccccaggaggagaggctttctcggtatcagcagtttaaagattttcaacgacgaattcttgtggctaccaacctatttggccgaggcatggacatcgagcgggtgaacattgcttttaattatgacatgcctgaggattctgacacctacctgcatcgggtggccagagcaggccggtttggcaccaagggcttggctatcacatttgtgtccgatgagaatgatgccaagatcctcaatgatgtgcaggatcgctttgaggtcaatattagtgagctgcctgatgagatagacatctcctcctacattgaacagacacggtagaagactcgcccattttggaatgtgaccgtctgtccttcaggagaggacaccagggtgggggtgaaggagacactactgcccccacccctgacagcccccaccccatggcttccatcttttgcatcaccaccactcctgaacccccatttctgatttgtcagaatttttttttaacaaaactaaaaatgaaacacatgtgtctgtggtatctataaaaaaaaaaa

SEQ ID NO: 213 - DNA, 1648 bp, Homo sapiens
  CDS (216)..(1424)
ccgcggtaccggtccggaattcccgggtcgacccacgcgtccgcgtcgctgttgctgccgccatacgcgctctccctgtttagctcttctgttagaaatagtatctttgttttcctttgctgttcctcaatcccctactcttcaccccttgttttcacctattttgcgagaacccatccagatcccccttcccttcttcccctgccggcccagttatggcagagaacgatgtggacaatgagctcttggactatgaagatgatgaggtggagacagcagctgggggagatggggctgaggcccctgccaagaaggatgtcaagggctcctatgtctccatccacagctctggctttcgtgacttcctgctcaagccagagttgctccgggccattgtcgactgtggctttgagcatccgtcagaagtccagcatgagtgcatccctcaggccattctgggaatggatgtcctgtgccaggccaagtcgggcatgggaaagacagcagtgtttgtcttggccacactgcaacagctggagccagttactgggcaggtgtctgtactggtgatgtgtcacactcgggagttggcttttcagatcagcaaggaatatgagcgcttctctaaatacatgcccaatgtcaaggttgctgttttttttggtggtctgtctatcaagaaggatgaagaggtgctgaagaagaactgcccgcatatcgtcgtggggactccaggccgtatcctagccctggctcgaaataagagcctcaacctcaaacacattaaacactttattttggatgaatgtgataagatgcttgaacagctcgacatgcgtcgggatgtccaggaaatttttcgcatgaccccccacgagaagcaggtcatgatgttcagtgctaccttgagcaaagagatccgtccagtctgccgcaagttcatgcaagatccaatggagatcttcgtggatgatgagacgaagttgacgctgcatgggttgcagcagtactacgtgaaactgaaggacaacgagaagaaccggaagctctttgaccttctggatgtccttgagttcaaccaggtggtgatctttgtgaagtctgtgcagcggtgcattgccttggcccagcagtttaaagattttcaacgacgaattcttgtggctaccaacctatttggccgaggcatggacatcgagcgggtgaacattgcttttaattatgacatgcctgaggattctgacacctacctgcatcgggtggccagagcaggccggtttggcaccaagggcttggctatcacatttgtgtccgatgagaatgatgccaagatcctcaatgatgtgcaggatcgctttgaggtcaatattagtgagctgcctgatgagatagacatctcctcctacattgaacagacacggtagaagactcgcccattttggaatgtgaccgtctgtccttcaggagaggacaccagggtgggggtgaaggagacactactgcccccacccctgacagcccccaccccatggcttccatcttttgcatcaccaccactcctgaacccccatttctgatttgtcagaatttttttttaacaaaactaaaaatgaaacacatgtgtctgtggtatctataaaaaaaaaaa

SEQ ID NO: 214 - DNA, 1280 bp, Homo sapiens
  CDS (103)..(1158)
atttggccctcgaggccaagaattcggcacgaggggaggcggtggcccttctgttgctagaccgagcctgtgggatataccaaggcagaggagcccatagccatgaggagcctcggggccctgctcttgctgctgagcgcctgcctggcggtgagcgctggccctgtgccaacgccgcccgacaacatccaagtgcaggaaaacttcaatatctctcggatctatgggaagtggtacaacctggccatcggttccacctgcccctggctgaagaagatcatggacaggatgacagtgagcacgctggtgctgggagagggcgctacagaggcggagatcagcatgaccagcactcgttggcggaaaggtgtctgtgaggagacgtctggagcttatgagaaaacagatactgatgggaagtttctctatcacaaatccaaatggaacataaccatggagtcctatgtggtccacaccaactatgatgagtatgccattttcctgaccaagaaattcagccgccatcatggacccaccattactgccaagctctacgggcgggcgccgcagctgagggaaactctcctgcaggacttcagagtggttgcccagggtgtgggcatccctgaggactccatcttcaccatggctgaccgaggtgaatgtgtccctggggagcaggaaccagagcccatcttaatcccgagagtccggagggctgtgctaccccaagaagaggaaggatcagggggtgggcaactggtaactgaagtcaccaagaaagaagattcctgccagctgggctactcggccggtccctgcatgggaatgaccagcaggtatttctataatggtacatccatggcctgtgagactttccagtacggcggctgcatgggcaacggtaacaacttcgtcacagaaaaggagtgtctgcagacctgccgaactgtggcggcctgcaatctccccatagtccggggcccctgccgagccttcatccagctctgggcatttgatgctgtcaaggggaagtgcgtcctcttcccctacgggggctgccagggcaacgggaacaagttctactcagagaaggagtgcagagagtactgcggtgtccctggtgatggtgatgaggagctgctgcgcttctccaactgacaactggccggtctgcaagtcagaggatggccagtgtctgtcccggggtcctgtggcaggcagcgccaagcaacctgggtccaaataaaaactaaattgtaaactcctgaaaaaaaaaa

SEQ ID NO: 215 - DNA, 2319 bp, Homo sapiens
  CDS (507)..(1874)
  misc_feature (1)...(2319): n = a,t,c or g
gcgtgacgatataactatctattcgatgatgaagataccccaccaaacccaaaaaaagagatctctcgaggatccgaattcgcggccgcgtcgacgcaggacagatttatctgttgaatactcttgggcaggaaaaccatgtaaaacctctggaagcagcatcaggacagcagagcagagcccccgtcctcactgctcacttgcacagaaactccatctggactcggatgcttttactgaagacccatctagcttcaatcatctttagagtccatccattctggagagacctggcgtttgcagttgcctcctgtggccgtgtttttctgtcattctgttcccaggccttctattcaggcggttgaagggtgtggactttggaatggggtttgctgttcttcgggaacttgcttcctttccctggctggcgctgtcaggaaggaccatctgaaggctgcaatttgttcttatggaggcaggtgctggcctggcctggatcttccaccatgttcctgttgctgccttttgatagcctgattgtcaaccttctgggcatctccctgactgtcctcttcaccctccttctcgttttcatcatagtgccagccatttttggagtctcctttggtatccgcaaactctacatgaaaagtctgttaaaaatctttgcgtgggctaccttgagaatggagcgaggagccaaggagaagaaccaccagctttacaagccctacaccaacggaatcattgcaaaggatcccacttcactagaagaagagatcaaagagattcgtcgaagtggtagtagtaaggctctggacaacactccagagttcgagctctctgacattttctacttttgccggaaaggaatggagaccattatggatgatgaggtgacaaagagattctcagcagaagaactggagtcctggaacctgctgagcagaaccaattataacttccagtacatcagccttcggctcacggtcctgtgggggttaggagtgctgattcggtactgctttctgctgccgctcaggatagcactggctttcacagggattagccttctggtggtgggcacaactgtggtgggatacttgccaaatgggaggtttaaggagttcatgagtaaacatgttcacttaatgtgttaccggatctgcgtgcgagcgctgacagccatcatcacctaccatgacagggaaaacagaccaagaaatggtggcatctgtgtggccaatcatacctcaccgatcgatgtgatcatcttggccagcgatggctattatgccatggtgggtcaagtgcacgggggactcatgggtgtgattcagagagccatggtgaaggcctgcccacacgtctggtttgagcgctcggaagtgaaggatcgccacctggtggctaagagactgactgaacatgtgcaagataaaagcaagctgcctatcctcatcttcccagaaggaacctgcatcaataatacatcggtgatgatgttcaaaaagggaagttttgaaattggagccacagtttaccctgttgctatcaagtatgaccctcaatttggcgatgccttctggaacagcagcaaatacgggatggtgacgtacctgctgcgaatgatgaccagctgggccattgtctgcagcgtgtggtacctgcctcccatgactagagaggcagatgaagatgctgtccagtttgcgaatagggtgaaatctgccattgccaggcagggaggacttgtggacctgctgtgggatgggggcctgaagagggagaaggtgaaggacacgttcaaggaggagcagcagaagctgtacagcaagatgatcgtggggaaccacaaggacaggagccgctcctgagcctgcctccagctggctggggccaccgtgcggggtgccaacgggctcagagctggagttgccgccgccgcccccactgctgtgtcctttccagactccagggctccccgggctgctctggatcccaggactccggctttcgccgagccgcagcgggatccctgtgcacccggcgcagcctacccttggtggtctaaacggatgctgctgggtgttgcgacccangacgagatgcctttgtttcttttacaataagtcgttggangaatgccattnaagtgaactccccacctttgcacnctnttccgggcttaattggttgggganatnttggccattggtcttgtgcttanaaaatggcngtaccaagaaatctttttnttccaaancccccttttgccaanggattttccttngggggggcnggccaccccccttnttc

SEQ ID NO: 216 - DNA, 1908 bp, Homo sapiens
  CDS (116)..(1519)
ttgaacccttgatcgcctgcggtaccggtccggaattcccgggtcgacccacgcgtccggaagaaccctgaggaacagacgttccctcgcggccctggcacctccaaccccagatatgctgctgctgctgctgctgcccctgctctgggggagggagagggtggaaggacagaagagtaaccggaaggattactcgctgacgatgcagagttccgtgaccgtgcaagagggcatgtgtgtccatgtgcgctgctccttctcctacccagtggacagccagactgactctgacccagttcatggctactggttccgggcagggaatgatataagctggaaggctccagtggccacaaacaacccagcttgggcagtgcaggaggaaactcgggaccgattccacctccttggggacccacagaccaaaaattgcaccctgagcatcagagatgccagaatgagtgatgcggggagatacttctttcgtatggagaaaggaaatataaaatggaattataaatatgaccagctctctgtgaacgtgacagccttgacccacaggcccaacatccttatccccggtaccctggagtctggctgcttccagaatctgacctgctctgtgccctgggcctgtgagcaggggacgccccctatgatctcctggatggggacctctgtgtcccccctgcacccctccaccacccgctcctcagtgctcaccctcatcccacagccccagcaccacggcaccagcctcacctgtcaggtgaccttgcctggggccggcgtgaccacgaacaggaccatccaactcaatgtgtcctaccctcctcagaacttgactgtgactgtcttccaaggagaaggcacagcatccacagctctggggaacagctcatctctttcagtcctagagggccagtctctgcgcttggtctgtgctgttgacagcaatccccctgccaggctgagctggacctggaggagtctgaccctgtacccctcacagccctcaaaccctctggtactggagctgcaagtgcacctgggggatgaaggggaattcacctgtcgagctcagaactctctgggttcccagcacgtttccctgaacctctccctgcaacaggagtacacaggcaaaatgaggcctgtatcaggagtgttgctgggggcggtcgggggagctggagccacagccctggtcttcctctccttctgtgtcatcttcattgtagtgaggtcctgcaggaagaaatcggcaaggccagcagcggacgtgggagacataggcatgaaggatgcaaacaccatcaggggctcagcctctcagggtaacctgactgagtcctgggcagatgataacccccgacaccatggcctggctgcccactcctcaggggaggaaagagagatccagtatgcacccctcagctttcataagggggagcctcaggacctatcaggacaagaagccaccaacaatgagtactcagagatcaagatccccaagtaagaaaatgcagaggctcgggcttgtttgagggttcacgacccctccagcaaaggagtctgaggctgattccagtagaattagcagccctcaatgctgtgcaacaagacatcagaacttattcctcttgtctaactgaaaatgcatgcctgatgaccaaactctccctttccccatccaatcggtccacactccccgccctggcctctggtacccaccattctcctctgtacttctctaaggatgactactttagattccgaatatagtgagattgtaacgtgtttgtctctctgtgcctggcttatttcactcaacataacatcctctaagttcatctgtgttgtttccaatgacagagtaatgtactgaataattcaaaatagctaaaa

SEQ ID NO: 217 - DNA, 1642 bp, Homo sapiens
  CDS (90)..(1214)
ccggaattcccgggtcgacccacgcgtccgcggacgcgtgggtgaggaacagacgttccctcgcggccctggcacctccaaccccagatatgctgctgctgctgctgctgcccctgctctgggggagggagagggtggaaggacagaagagtaaccggaaggattactcgctgacgatgcagagttccgtgaccgtgcaagagggcatgtgtgtccatgtgcgctgctccttctcctacccagtggacagccagactgactctgacccagttcatggctactggttccgggcagggaatgatataagctggaaggctccagtggccacaaacaacccagcttgggcagtgcaggaggaaactcgggaccgattccacctccttggggacccacagaccaaaaattgcaccctgagcatcagagatgccagaatgagtgatgcggggagatacttctttcgtatggagaaaggaaatataaaatggaattataaatatgaccagctctctgtgaacgtgacagaccctcctcagaacttgactgtgactgtcttccaaggagaaggcacagcatccacagctctggggaacagctcatctctttcagtcctagagggccagtctctgcgcttggtctgtgctgttgacagcaatccccctgccaggctgagctggacctggaggagtctgaccctgtacccctcacagccctcaaaccctctggtactggagctgcaagtgcacctgggggatgaaggggaattcacctgtcgagctcagaactctctgggttcccagcacgtttccctgaacctctccctgcaacaggagtacacaggcaaaatgaggcctgtatcaggagtgttgctgggggcggtcgggggagctggagccacagccctggtcttcctctccttctgtgtcatcttcattgtagtgaggtcctgcaggaagaaatcggcaaggccagcagcggacgtgggagacataggcatgaaggatgcaaacaccatcaggggctcagcctctcagggtaacctgactgagtcctgggcagatgataacccccgacaccatggcctggctgcccactcctcaggggaggaaagagagatccagtatgcacccctcagctttcataagggggagcctcaggacctatcaggtcaagaagccaccaacaatgagtactcagagatcaagatccccaagtaagaaaatgcagaggctcgggcttgtttgagggttcacgacccctccagcaaaggagtctgaggctgattccagtagaattagcagccctcaatgctgtgcaacaagacatcagaacttattcctcttgtctaactgaaaatgcatgcctgatgaccaaactctccctttccccatccaatcggtccacactccccgccctggcctctggtacccaccattctcctctgtacttctctaaggatgactactttagattccgaatatagtgagattgtaacgtgtttgtctctctgtgcctggcttatttcactcaacataacatcctctaagttcatctgtgttgtttccaatgacagagtaatgtactgaataattcaaaatagctaaaagagaggagtttaaatgttgtcaccaaaaaaaaaaaaaaa

SEQ ID NO: 218 - DNA, 11736 bp, Homo sapiens
  CDS (229)..(11253)
ggacaatgccgcctgtgtgccgtcaccccagcacgctggctcaaggggagggctgtggtgcagccctgctccagccttggcctctcctgatgtccctctccctccctccacagcccctgctatctgccatctccatccgtccagctgggccgcctctgtggaacccaggcatcaccaaggtttagggagccatccagcagctcctcatccccaaagtctgcagggctgatggctggtcagccccacagtccccgggagctcctcggggctgcagggcaccgcagcaggaggcccagcacagaactccgggtcccgcccagtccaagtctcaccatggactctcagtacgagacgggccacattcgcaagctacaggcccggcacatgcagatgcaggagaagactttcaccaagtggatcaataacgtcttccagtgcggccaggcgggcatcaagatccggaacctgtacacagagctggctgacggcatccacctcctgcggctgctggagctcatctcaggggaggccctgccacccccgagccggggccgcctgcgtgtgcacttcctggagaacagcagccgagctctggccttcctcagggccaaggtgccagtaccactcatcgggccagagaacatcgtggacggagaccagacactcatcctgggactcatctgggtcatcattctgcgtttccagatctcccacatctccttggacaaggaggagtttggggccagcgcagccctgctgtccaccaaggaagccctgctggtctggtgccagcggaagacagccagctacaccaacgtgaacattacagatttctcccgaagctggagcgatgggctgggcttcaatgccctcatccatgcccacaggccagacctgttggactacggctccctgcgtccagaccgcccactgcacaaccttgcttttgctttcctggtggctgagcaggagctgggcattgctcagctgctggaccccgaggacgtggcagccgcacagccagatgagcgctctatcatgacctacgtctccctctactaccactactgctcccgcctgcatcaggggcagactgtccagaggagactcactaagatcctgcttcagctccaggagacagagctgctgcagacccagtacgagcagctggtggctgaccttctacgctggattgcagagaagcagatgcagctggaggcgcgggattttccagactcgctgcccgccatgcggcagctactggcagcattcaccatcttccgcacccaggagaagccaccccggctacagcagcgaggggccgcagaggccctgctcttccggctacagacagcactccaagcccagaaccgcaggcccttcctgcctcatgagggcctgggccttgcagagctgtcccagtgctgggcagggctggagtgggcagaggctgcaaggagccaggccctgcagcagaggctactgcagctgcagcggctagaaaccctggcccggcgcttccagcgcaaggcagccctccgggagagtttccttaaggatgcagagcaggtgctagaccaggccagagccccgccagccagcctggccacagtggaggcagccgtccagaggctgggcatgctggaggctggcatcctgccccaggaggggcgcttccaggccctggctgagatcgcagacatcctccggcaggagcagtaccacagctgggcagatgtggcccgcaggcaggaggaagttaccgtgcgctggcagaggctccttcagcatctacagggacagaggaagcaggtggcagacatgcaggctgtgctgagcctgctgcaggaggtggaggctgcctcccaccagctggaggagctgcaggagccggccaggtccaccgcctgtgggcagcagctggcagaagtggtggagctgctgcagaggcatgacctgctggaggctcaagtctcggcccacggagcccatgtgagccatcttgctcagcagacagcagagctggactcctccctgggcaccagtgtggaggtgctgcaggccaaggccaggacactggcccagctccaacagagcctggtggctcttgtcagggcccggcgggccctgctggagcagaccctgcagcgggcagagttcctgcgcaactgtgaggaggaggaagcctggctgaaggagtgcggacagcgggtggggaatgcggccctgggccgggatctcagccagatcgcaggcgccctgcagaaacacaaggccctggaagctgaggtccaccgccaccaggccgtgtgcgtagatctcgtgcggaggggacgcgacctcagcgcccgcaggcccccaacgcagccggatcccggggaacgggcagaggccgttcagggagggtggcagctgctccagacccgggtggtggggcggggcgcacggctgcagacagccctgctggtcctgcagtacttcgcggacgcggcggaggcggcttcgtggctgcgcgagcggcgatcctcgctggagagagcgtcctgcggtcaggaccaggcggccgccgagaccctgctgaggcgccacgtgcggctggagcgcgtcctgcgcgccttcgcggccgagctgcggcggctggaggagcaggggcgggcggcctcggcccgggcgtcgttattcacggtgaactctgccctgagccctccaggagaaagcctgaggaacccagggccctggagtgaggcttcctgccaccctggccctggggatgcctggaagatggccctcccagctgagcctgaccctgactttgatcccaacactatactccagacacaggaccacttgagtcaggactatgagagtctgcgggccctggcacagctccgcagggcccggttggaggaggccatggccctgttcggtttctgcagttcctgtggggagctccagttgtggctggagaagcagacagtgctgctccaaagggtgcagccccaggctgacaccctggaggtcatgcagctcaaatatgagaacttcctcactgccctggctgtgggaaagggcctctgggctgaggtcagcagctctgctgagcaactgaggcagagatatcctgggaactccacacaaatccaacgacagcaggaggaactgagccagaggtgggggcagctggaggccctgaagagggagaaggccgtgcagctggcacacagtgtggaagtgtgcagttttctgcaggagtgtggacccacacaggtccagctgcgagacgtgctcctccagctggaggccctgcagccagggagctcagaggacacccgccacgccctgcagctggcccagaagaagaccctggtgctggagaggagggtctacttcctccaaagtgtggtcgtaaaggtcgaggagccaggctacgcagagagccagcctctgcaaggacaggtggagacactgcaggggctgctgaagcaagtacaggaacaagtggcccaacgggcccggcgccaggctgagactcaggcccggcagagcttcctgcaagagagccagcaactgctactgtgggcagagagtgtccaggctcagctgcgcagcaaggaggtgtcagtggatgtggcctcggctcagcggctgctgagggagcatcaagacctgctggaggagatccacctgtggcaggagaggctgcagcagctggacgctcagagccagcccatggcagccttggactgcccagactcccaagaggtgcccaacactctgagggtcctggggcagcagggccaggagctgaaggttttgtgggagcagaggcagcagtggctgcaagaggggctggagctgcagaagtttggccgagaagtggatggtttcactgccacctgtgccaaccaccaggcctggctgcacctggacaaccttggggaggacgtgagggaggccctgagcctgctgcagcagcaccgggagtttgggcggctcctgagcaccctggggcctcgggcagaggctctgcgggcacacggcgagaagctggttcagagccagcacccagctgcacacacggtcagagagcagctgcagagtatccaggcacagtggaccaggctccaggggaggagtgagcagaggaggaggcagttgctggcttccctccagctccaggagtggaagcaggatgtggcagagctgatgcagtggatggaagagaaggggctgatggctgcgcatgagccctccggagcgcgcagaaacatcctgcagacactcaagcggcacgaagcagctgagagcgagctactcgccacccgcagacacgtggaggccctgcagcaggttgggagagagctgttgagtaggaggccctgtggccaggaggacatacagaccaggcttcaaggcctgagaagcaagtgggaagctttgaaccgcaagatgactgagcgtggggacgagctccagcaggctggacagcaggagcaactcctgaggcagctgcaggatgcaaaggagcagctggagcagctcgaaggggccctacagagctcggaaacagggcaggacctgcgctccagccagaggctgcagaaacggcaccaacagctggagagtgagagccggaccctggctgccaagatggctgccctcgcctccatggcccatggcatggccgcctccccggccatcctggaagagacccagaagcacctccggaggctggagcttctgcaggggcatctggccatccggggcctgcagctgcaggcctcagtggagctgcaccagttctgccacctgagcaacatggagctctcttgggtagccgagcacatgccccatggcagccccaccagctataccgagtgcttgaatggtgcccagagccttcaccgcaagcacaaggagctccaggtggaggtaaaagctcaccaggggcaggtgcaacgggtgctgagttctgggcggagcctggcagcctcagggcacccccaagcccaacacatcgtggagcagtgccaggagctggaaggccactgggcagagctggagagggcatgtgaagcgcgggcccagtgtctgcagcaggctgtcactttccagcagtactttctggatgtgtcagagctggagggctgggtggaggagaagcggccgctggtgagcagtcgggactatggcagagacgaggcagccaccctcaggctcattaacaagcaccaggctctacaggaggaactagccatttactggagctccatggaggagcttgaccagacggcccaaaccctcactggccccgaagtccctgagcagcagcgtgtggtgcaggagaggctccgggagcagctgcgggcactgcaggagttggcggccacacgggaccgggaactggaggggaccctgaggctgcatgagttcctgagggaggctgaggacctgcagggctggctggcaagccagaagcaggcagccaaaggaggggagagcctgggagaggaccccgagcacgccctgcacctctgcaccaagtttgcaaagtttcagcaccaagtggagatgggcagccagcgggtggccgcctgccggctgctggcggagagcctgctagagcgtgggcacagtgctggccccatggtccgtcagaggcagcaggatctgcagaccgcctggtcggagctgtgggagctgacccaggcccgaggccacgcgctccgagacaccgagaccaccctcagagttcacagagatctcttggaagtcctcacccaggtccaggagaaagccacgagcctccccaacaatgtggcacgggacctgtgtgggctggaggcgcagctgagaagccaccaggggctggagcgagaactcgtgggcaccgagcggcagctgcaggaactgctggagactgcaggcagggtgcagaagctgtgtccggggcctcaggcccatgcggtgcagcagaggcagcaagctgtgacgcaggcgtgggcagtgctgcagcgacgcatggagcagcgcagggcccagctggagcgggcacgcctcctggcccgcttccgcacggcggtgcgtgactatgcctcctgggcagcccgcgtgcgccaggacctgcaggtggaggagagttcgcaagagcctagcagtggcccgctgaagctcagtgcccaccagtggctccgggcggagctggaggcccgggagaagctgtggcagcaggccacccagctggggcagcaggcacttcttgctgcagggacacccaccaaggaggtccaggaagagcttcgagccctgcaggaccagcgggaccaggtgtatcagacctgggcacggaagcaagagaggctgcaggccgagcagcaggagcagctcttcctcagagagtgcggccgcctggaggagatcctcgcggcccaggaggtctccctgaaaaccagtgccttggggagctcggtggaagaggtagagcagttgattcgcaagcacgaggtcttcctgaaggttctgactgcccaggacaagaaggaggcagccctgcgtgagcggctgaagacgctccggcgcccccgggtgcgggaccggcttcccatcctgctgcagcgccggatgagagtgaaggagctggcggagagccggggacacgccctgcatgcctccctgctgatggccagcttcacccaggccgcaacccaggctgaggactggatccaggcgtgggcccagcagctgaaggagccggtccctcctggggacctgagagataagctgaagcccctgctgaaacaccaggcctttgaggctgaagtccaggcccatgaggaggtcatgacctctgttgccaagaagggagaggctctcctggcacagagtcaccctcgagccggagaggtctcccagcggctgcagggcctgcggaagcactgggaggacctgaggcaggcaatggccctcaggggccaggagctggaggacaggcggaacttcctggagttcctgcagagagtggaccttgcagaggcctggatccaggagaaggaggtgaagatgaatgttggtgacctgggccaggacctggagcactgcctgcagctccgacggcggctccgcgagttccgaggaaactcggccggggacacagtgggtgatgcctgcatcaggagcatcagtgacttgtcactgcagctcaagaaccgggaccctgaggaagtcaagatcatctgccagcggcgaagccagctcaacaacaggtgggcgagtttccatggcaacttgctccggtaccagcagcagctcgaaggggccttggagatacacgtgttgtcccgagagctggacaatgtcaccaagaggattcaggagaaggaagccctgatccaggccctggactgtgggaaagatctggagagcgtgcagaggctgctgcggaaacacgaggagctggagcgggaagtgcaccccatccaggcccaggtggagtccctagagcgtgaagtgggccgcctctgccaaagaagccccgaggcagcccacggcctcaggcacaggcagcaggaggtggctgagagctggtggcagctccggagcagggcccagaagcggagggaggcgctggatgccttgcaccaagctcagaaactccaggcaatgctgcaggaattgctggtcagcgcccagaggctgcgggctcagatggacacgagccccgctcctcgcagccctgtggaagcccggcgtatgttagaagagcatcaggagtgcaaggccgagctggactcctggacagacagcatcagcctggcccgaagcactgggcagcaactgctcacagcggggcaccccttcagctccgacattcgccaggtgctggctggcttagaacaggagctgagcagcctggaaggggcctggcaggagcatcagctacagctgcagcaggccctggagctacagctgtttctgagctcagtggagaagatggaacgttggctttgcagcaaggaagactccctagccagtgagggtctatgggaccccttggcccccatggagccccttctgtggaagcacaagatgctggagtgggacctggaggtgcaggcgggaaagatcagtgctctggaggccacggcccgcggcctgcaccagggtgggcaccccgaggcccagagtgccctgggcaggtgccaggccatgcttctgaggaaggaggcgctcttcaggcaagccgggacccgccgccatcgcctggaggagctccggcagctgcaggccttcctgcaggactcccaggaggtggctgcgtggctgagggagaagaacctggtggccttggaggagggtttgctggacacagccatgctgccagcacagttacagaagcagcagaatttccaggcggagctggacgcgagcatgcaccaacagcaggagctgcagcgggagggacagaggctgctgcaggggggccacccagcctcggaggccatccaggagcgactggaggagctgggagcactctggggtgagctgcaagacaactcccagaagaaggtggccaagctccagaaggcctgtgaggccctgcgtctgcggcggagcatggaggaactggagaactggctggagcccatcgaggttgagctgagagcccccactgtgggccaggccctgcctggggtgggcgagctcctgggcacacagagggagctggaggcagcagtggacaagaaggccaggcaggctgaggcactgctgggccaggccgaggcctttgtgagggaaggccactgccttgcccgagatgtggaagagcaggcccggcggctgcttcagaggttcaagagcctgagggagcccctgcaggagcgcaggacggccctggaggcccggagcctcctcttgaagttcttcagggacgccgacgaggaaatggcctgggtgcaggagaagctgcctctggccgctgcccaggactatggccagagcctgagtgcggtgcggcacctgcaggagcagcaccagaacctggagagtgagatgagcagccacgaggctctgacccgggtggtgctgggcactgggtacaagctggtgcaggctgggcactttgccgcccacgaggtggccgcccgggtgcagcagctggagaaggccatggcccacctgcgggcagaggcggcgcggaggcggcttctgctgcagcaggctcaggaggcccagcagtttctgactgagctcctggaggcgggatcctggctggctgagcggggccatgtcctggacagcgaggacatgggccacagtgctgaagccacacaggcccttctgcggcggctggaggccaccaagagagacctggaagcgttcagcccacgcatcgagcggctgcagcagacagcagcactcctggagagcaggaagaacccagaaagccccaaggtgctagcccagctgcaggcagttcgggaggcccacgcagagctgctgcggagggcggaggccagggggcacggcctgcaggagcagctgcagctacaccagctggagcgagagaccctgctcctcgacgcctggctgaccaccaaggcggccaccgccgagtcccaggactacgggcaggacctggagggtgtcaaggtgctggaagagaagtttgatgctttcagaaaggaagtgcagagcctgggccaggccaaggtgtatgccctgaggaagttggcaggcaccctggagcggggtgcacccaggcgctatccccacatccaagcccagaggagccgcattgaggctgcttgggagaggttggaccaagcaataaaagcccgcacagagaacttggctgcagcccatgaggtccacagctttcagcaggcagcagctgagctccagggaaggatgcaggagaagacggccctgatgaagggggaggacggaggccacagcctgtcatctgtgcggaccctgcagcaacagcacaggcgcctggagagagagctggaagctatggagaaggaggtggcacggctacagacggaggcctgccgactgggccagctacatcctgcagctccggggggcctggccaaggtgcaggaggcctgggccaccctgcaggcgaaggcccaggagcgaggccagtggctggcgcaggctgcacagggccatgccttcctcgggcgctgccaggaactgctagcatgggcacaggagaggcaggagctggcgtcctccgaggagctggctgaggacgtggcgggggctgagcagctccttgggcagcatgaagagctggggcaagaaatcagggagtgccgccttcaagcccaggacctgcggcaggaaggacagcagctggtggacaacagccacttcatgtctgcggaggtgacagagtgcctgcaggagctggaagggcggctgcaggagctggaggaggcttgggccctgcgctggcaacgctgtgccgagagctggggcctgcagaagcttcggcagaggctggagcaggctgaggcctggctggcctgctgggagggactcctgctgaagcccgactatgggcactcagtgtcagatgtggagttgctgctgcacagacaccaggacttagaaaagctgctggcagcccaggaagagaagtttgcccaaatgcaaaagacagagatggaacaggagctcctgctgcagccacaggagctgaagcccgggagagctggcagctcgctgacatcctttcagtggaggccctctggacaccaggggctaggagcacagctggctgagacgagggacccccaggatgcaaagggtacccccaccatggaggggtctttggagttcaagcagcacctgctgcctggcgggaggcagcctagctcgagctcctgggacagctgccgcgggaccttgcagggcagctctctgagcctgttcctggatgagaggatggcagcggagaaagtagcttccatagccctccttgacctcacgggagcccggtgtgagaggctgcggggccgccacggcaggaaacacacattctccttaaggctgaccagtggggcagagatcctgtttgcagcaccgtccgaagagcaggctgagagctggtggcgagccctgggcagcactgcagcccagagtctgagcccaaaactcaaagccaaacctgtcagctctctgaatgagtgcacgaccaaggatgcccggcctggatgtctactcaggtctgatccctgaggtgaaccccagtgcaacaccaaacttcaggggcacaagcgaggacacatctaagggaccagaataagactcagctacaggcaaaagggctccttcccgtggctgcttcaacccagttccccaggcccagcttctggaatagacagttccttctggttagatgggtcctaccatgtggcaggaaacagccattgcctggcctccccctgcattcctgtctgggtgaagaggagacgtgttacggcagagcaggtgggcaaggccagggctaccccaggcccatgtggcctcctccttgcttggaaggggtgactctgagcacaggtagacgcagacgtgtgcagagaatgtgctcttcggaggaagaacactgatgagcgagctctgtaccagcccttgtcatgtacagccaagagcctagaatgacatggcccttctcagcagtaataacagatggtctcagcgcctcaaaaaaaaaaaaaa

SEQ ID NO: 219 - DNA, 5206 bp, Homo sapiens
  CDS (1230)..(3248)
tgtggacacgctgcaggcacccgtccggaattcccgggtcgacgatttcgtccggacggaggcatcggaggcggctgcgagagtggttgaggagctggcggagagcggcctgcgggcgatcgggccgagcctcgctcaaggagcacccccggggcaccctcctgtccgatggcagcccggccctgtccaggaatgtcggtatgacggtctctcagaaagggggtccccagccaacaccgagcccggctggccctgggacgcaactcggaccaatcacaggagagatggatgaagccgattctgcgtttttaaaatttaagcagacagctgatgactctctgtcccttacatctccaaacaccgagtccatttttgtagaagatccctacaccgcctcgctgaggagtgagattgagtcagacggccacgagtttgaagctgagtcctggagcctcgccgtggatgcagcctacgccaagaagcaaaagagggaggtggtgaaaagacaagatgtcctttatgagctgatgcagacagaggtgcaccacgtgcggacgctcaagatcatgctgaaggtgtactccagggccctgcaggaggagctgcagttcagcagcaaggccattggccgcctcttcccatgcgctgacgacctgctggagacgcacagccacttcctcgctcggctcaaggagcgccgccaggagtccctggaggagggcagtgaccggaattatgtcatccagaaaatcggcgacctcctggttcagcagttttcaggtgaaaatggggaaagaaaaaaaaaaaagtacggtgtgttttgtagtggccacaatgaagctgttagtcattacaagttgctgcttcagcaaaacaagaaatttcaaaacttgatcaagaaaattggcaacttctccatcgtgcggcggcttggcgtgcaggagtgcattctcctggttacacaacgcataaccaaatacccagtgctggtggagcgcatcatccagaacacggaagctggcactgaggactatgaagacctgacccaggccttgaacctcatcaaagatatcatctcacaagtggacgccaaggtcagtgagtgtgagaagggccagcgcctcagggagatcgcagggaagatggacctgaagtcttccagcaaactcaagaacgggctcaccttccgcaaggaagacatgcctcagcggcagctccacctggagggcatgctatgctggaagaccacatcagggcgcttgaaagatatcctggctatcctgctgaccgacgtacttttgctgctacaagaaaaagatcagaaatacgtctttgcttctgtggactcaaagccacccgtcatctcgttacaaaagctcatcgtgagggaagtggccaacgaggagaaagcgatgtttctgatcagcgcctccttgcaagggccggagatgtatgaaatctacacgagctccaaagaggacaggaacgcctggatggcccacatccaaagggctgtggagagctgccctgacgaggaggaggggcccttcagcctgcccgaagaggaaaggaaggtggtcgaggcccgcgccacgagactccgggactttcaagagcggttgagcatgaaagaccagctgatcgcacagagcctcctagagaaacagcagatctacctggagatggccgagatgggcggcctcgaagacctgccccagccccgaggcctattccgtggaggggacccatccgagaccctgcagggggagctaattctcaagtcggccatgagcgagatcgagggcatccagagcctgatctgcaggcagctgggcagcgccaacggccaggcggaagacggaggcagctccacaggcccgcccaggagggctgagaccttcgcgggctacgactgcacaaacagccccaccaagaatggcagtttcaagaagaaagtcagcagcactgaccccaggccccgagactggcgaggccccccaaacagcccggacttgaagctcagtgacagtgacattcctgggagctctgaggaatcgccgcaggtggtggaggcgccaggcacggaatccgatccccgtctgcccaccgtcctggagtcggagcttgtccagcggatccagacactgtcccagctgctcctgaaccttcaggcggtaatcgcccaccaggacagctatgtggagacgcagcgggctgccatccaggagcgggagaagcagttccggctgcagtcgacgcgtgggaacctgctgctggagcaggagcggcaacgcaacttcgagaagcagcgggaggagcgcgcggccctggagaagctgcagagccagctgcggcacgagcagcagcgctgggagcgcgagcgccagtggcagcaccaggagctggagcgtgcgggcgcgcggctgcaggagcgcgagggcgaggcgcggcagctacgcgagcggctggagcaggagcgggccgagctggagcgccagcgccaggcctaccagcacgacctggagcggctgcgcgaggcccagcgtgccgtggagcgcgagcgggagcgcctggagctgctgcgccgcctcaagaagcagaacaccgcgccaggcgcgctgccgcccgacacactggccgaggcccagcccccaagccaccctcccagcttcaacggggaagggctggagggccctcgggtgagcatgctgccatccggcgtggggccagagtacgcagagcgccccgaggtggctcgccgggacagcgcccccaccgagagccggctggccaagagcgatgtgcccatccagctgctcagcgccaccaaccagttccagaggcaggcggccgtgcagcagcagatccccaccaagctggcggcctccaccaagggtggcaaggacaagggcggcaagagcaggggctctcagcgctgggagagctcagcgtccttcgacctgaagcagcagctgctgctcaacaagctcatggggaaagatgagagcacctcacggaaccgccgctcgctgagccctatcctgcccggcagacacagtcctgcgcccccaccagaccctggcttccccgccccgagcccaccgccagctgacagcccctccgagggcttctctctcaaggccgggggcacagccctcctgcccggccccccagctccctcgccactgccggccacaccactcagcgccaaggaggacgccagcaaagaagacgtcatcttcttctaaaagggccgtgactcaaggaaagtttttaatggaaagttgagccagaactaaaccagggagctgtctgaaatcatagcaccccatccgggtggcggggagatcaactccgagctgtttttccgaggcagtgaggaacggtgccggctctgcacggagctgaggacaggacagaccttgctttgagaaggagctgccggccggggccacgctccacagccgccgcgcgacagtggagccaagggttagggcaccaggaggggccaggtggcgtcggcagcatctgtccccagaatcaggcagaatccacttcccaaacagagccccacgcaggttcaccatgaacctcagggtcagggaatgagccaggcacgggggcatgggcagagagggccacggggcagggcccactgagggaacatcagtggccctccagtcaggttctgtgggtttggaagcccatcgtgaaaggggctgacctttgcccctttttacttggcattggttttgaaaccagctgtttcccaaactctgcttcccaagggcaaccgttgctgttcacacgctcagcctgtctgggggagcgggcctctagcttcagccagggcgggtacacaccctgggcacagggtcctcagcccccgggaaatgagctcccagggctggcgtcccaccttccaggtgggggctggcacatcacagactgtcgagagcgccatgtcccagggcatgcagaggttgcacctagagacgttgcagcaagtggacaagtggccgctgtgcgggcccctcgcttgtagtgagctgttgcagcttacggtccgttccctggaggggtggaggaaggaggtgttgggcagcatcaaaggtgctgggacatcccagggtggtgagatccatccacgatccagctccggtggagaaagggcccatgtcaagccttgttctgcaccccaagcattggtggtaggactgggtcctggctgatcgtccttgttcccagtggggtacatgtgagcccctgccagggccaagtccttctcccgaacccagggtcctgggaactgcagatcccggggggattcagcccttctcccactgtgctggcagaggcactcctgtgacgctgaatacagtgaacagggacattcccgccactcggggacagatgggcacaagggaggggaaactccatcaggaagtgctcccctgggcagaggcgcccactgggtgctgtgggctcaggagggggcggggcaggagctggtgccaaccgggaaccagagccccacagccatacagcccattggtgacaaggtcctgagaacacagtggccaggtgtccccaggctcctggcccctccgacgacctcaactctgcccagcccggtccctggccatcagcgacgctgtccgccccccgtcagatcccatgtgtgccatgtttatcatcagtgttttgtatttttgtactgagtatcggagcactttacagaagctgactgtacattcctgttctgttgtgaagagaacattcccagaccctggcaccctcctgagccggcgtgtgccggtccagccctccgagatgccacaattccttggatgggggagaagttcaaggaatttctgctcggccacgcggtgggaaccccgcgtccccgccatgtggcagaggggtctcagtcgtgctaggcatcgggcggcagcgccgacagcccttccctcgccagtgcccctcggccactcctgggttggagcccgattttatttgtaaagttgacagtcgagcaaatgttcctattttcgtgggatctgcacacgtctttgtcagttgtggtcatgatcttagtcacctgctaattatttttacaatgattacaacatttcctcactgcgggatatttctgacccgctttagaacttaagacctgattctagcaataaacgtgtccgagatg

SEQ ID NO: 220 - DNA, 2784 bp, Homo sapiens
  CDS (388)..(1776)
gaaccggtccggaattcccgggtccacgatgtttgcgaatcccgcaagctccatttcatgagtaagcgtgagagccgctcagtttcctccagctctgctgaagccagcacagaagtagcccaaactcttccctctgctgacagcaaattttaggcaaagtcttgagaaagaagaaattgggtccagaaagggaagtgaggagaatcagatcccagacctttggggagaaggagcaaccgcctctggcacagcccatcagggagaaagagcaggttgagaagagtcctaagctaacagccccaaacaggtgggtgttgctcagctccctgaggcatgtggttgtaaggcagaacccacagaccttgcaggaagaaggctctcggggccatggcccaggtcagcatcaacaatgactacagcgagtgggacttgagcacggatgccggggagcgggctcggctgctgcagagtccctgtgtggacacagcccccaagagtgagtgggaagcctctcctgggggtctggacagaggcaccacttccacacttggggccatcttcatcgtcgtcaacgcgtgcctgggtgcagggttactcaacttcccagcagccttcagcattgcggggggcgtggcagcaggcatcgcactgcagatgggtatgctggttttcatcatcagtggccttgtcatcctggcctactgctcccaggccagcaatgagaggacctaccaggaggtggtatgggctgtgtgtggcaagctgacaggtgtgctatgtgaggtggccatcgctgtctacacctttggcacctgcattgccttcctaatcatcattggcgaccagcaggacaagattatagctgtgatggcgaaagagccggagggggccagcggcccttggtacacagaccgcaagttcaccatcagcctcactgccttcctcttcatcctgcccctctccatccccagggagattggtttccagaaatatgccagcttcctgagcgtcgtgggtacctggtacgtcacagccatcgttatcatcaagtacatctggccagataaagagatgaccccagggaacatcctgaccaggccggcttcctggatggctgtgttcaatgccatgcccaccatctgcttcggatttcagtgccacgtcagcagtgtgcccgtcttcaacagcatgcagcagcctgaagtgaagacctggggtggagtggtgacagctgccatggtcatagccctcgctgtctacatggggacaggcatctgtggcttcctgacctttggagctgctgtggatcctgacgtgctcctgtcctatccctcggaggacatggccgtggccgttgcccgagccttcatcatcctgagcgtgctcacctcctaccctatcctgcacttctgtgggcgggcggtggtggaaggcctgtggctgcgctaccagggggtgccagtggaggaggacgtggggcgggagcggcggcggcgagtgctgcagacgctggtctggttcctgctcaccctgctgctggcgctcttcatccctgacatcggcaaggtgatctcagtcattggaggcctggccgcctgcttcatcttcgtcttcccagggctgtgcctcattcaagccaaactctctgagatggaagaggtcaaaccagccagctggtgggtgctggtcagctacggagtcctcttggtcaccctgggagccttcatcttcggccagaccacagccaacgccatctttgtggatctcttggcataaccactgcctcccagggaacacaaggcctttgccattggtcgcaggaacccatctcttagagctatggggccattcttagtccacgatcattccaactggtgggatgacatccggacatcctcttccagggactggggcaaactcaggccccacacctctggacagctcaaatccagtccccttcctgctccccagtcctggcagtgccgtggatggcggcaggaagtctcacatcatagaggacccctcctcctctcccagttctcaacttctccatgcctggaatccacgggtgaagagagtcggtagatctcataagaaagaatccagtctgacttccctctggagaatgactatggacagaaggccaccatcctccacagagcaccctgtcctgagtaggggttgtgctcattaccccaggccagtggtagcttcctcaggagcctggccacttccaaaggtagcactgaagtcatgcaaatacatagtcaggtagattcagaccttgtccacaccttcctggggcaacccccaccatgaacctgtcagcctctttcccatagctaatagacatttcccaggccttgaggggccccaccctgtctctttcatcaaacctgatggtccaggctgggcatccctctcctcctccatccccagacatcaccaggtctaatgtttacaaacggtgccagcccggctctgaagccaagggccgtcccgtgccacggtgctgtgagtattcctccgttagctttccccataaggttgggagtatctgcttttgtgtctgagatgggcccctcttttcagaggccgcagggtgggtgatggagaaggctgagaacctttcagaccctctgtgtgggctgggctggtcagaatcagggtgtacctccccgacaccttctttttcagtgatgttttctcttctccctgcctttcctctgcctcctcccctgccagccctagcgtgactacccagagacaaaaaaaaaaaaaaaa

SEQ ID NO: 221 - DNA, 1101 bp, Homo sapiens
  CDS (1)..(1101)
atgcagctgcacatgagcacgctgaaggaacgggaccaattcttctctgagctgcaggagatccagcgcacttccacgccgcggcctgactggaccaagtgcaaagatgtggtggctgggggcccagagcgctggcagatgctggctgagggcaagaacagcgaccagctggtggacgtgctcctggaagagattggttcggggctgctgcgggagaaagacttcttccctggtctgggctatggggaagccatccctgcttttcttcggtttgatggcctcgtggagaacaagaagccaagcaagaaggacgtggtcaacctcctcaaggatgcctggaaggaacgtcttgctgaggagcagaaagagacgttcccagatttcttcttcaatttcctggagcatcgctttgggcccagtgatgccatggcctgggcttatactatttttgaaaatatcaagatcttccactccaacgaggttatgagtcagttctatgcagtcttgatgggaaagcggagtgagaatgtgtatgtcacccagaaggagacagtagcccagctgctgaaggagatgacaaatgctgacagtcagaacgaggggctactaaccatggagcagttcaacactgtcctcaagagtaccttccctctcaagacagaagagcaaatccaggagctgatggaggcagggggctggcatcccagcagcagcaatgcagacttgctcaactaccgctcactgtttatggaggatgaggagggccagagtgagccctttgtgcaaaaactctgggaacaatacatggatgagaaggacgagtacttacagcagctaaagcaggagcttggcatagaactccatgaggaagtgactctgcccaagctgcgagggggcctgatgaccatcgaccccagcctggacaagcagacagtgaacacctacatgagccaggccttccagctccctgagtcggaaatgccagaggagggtgacgagaaggaagaagccgtggtggaaatcctccagactgccctggagcggcttcaggtgattgacatcaggcgtgtgggacctcgagagccagagcctgcaagctag

SEQ ID NO: 222 - DNA, 1710 bp, Homo sapiens
  CDS (119)..(1660)
taagcttgcggccgctgcagcccggagctgagctagccgtccgagccgagccgtccgagccggggaagccgggcgcgtgctgccgctcgtggcggccgaggagaggagaggcagcagcatggcgagtgtcctgtcccgacgccttggaaagcggtccctcctgggagcccgggtgttgggacccagtgcctcggaggggccctcggctgccccaccctcggagccactgctagaaggggccgctccccagcctttcaccacctctgatgacaccccctgccaggagcagcccaaggaagtccttaaggctcccagcacctcgggccttcagcaggtggcctttcagcctgggcagaaggtttatgtgtggtacgggggtcaagagtgcacaggactggtggagcagcacagctggatggagggtcaggtgaccgtctggctgctggagcagaagctgcaggtctgctgcagggtggaggaggtgtggctggcagagctgcagggcccctgtccccaggcaccacccctggagcccggagcccaggccctggcctacaggcccgtctccaggaacatcgatgtcccaaagaggaagtcggacgcagtggaaatggatgagatgatggcggccatggtgctgacgtccctgtcctgcagccctgttgtacagagtcctcccgggaccgaggccaacttctctgcttcccgtgcggcctgcgacccatggaaggagagtggtgacatctcggacagcggcagcagcactaccagcggtcactggagtgggagcagtggtgtctccaccccctcgcccccccacccccaggccagccccaagtatttgggggatgcttttggttctccccaaactgatcatggctttgagaccgatcctgaccctttcctgctggacgaaccagctccacgaaaaagaaagaactctgtgaaggtgatgtacaagtgcctgtggccaaactgtggcaaagttctgcgctccattgtgggcatcaaacgacacgtcaaagccctccatctgggggacacagtggactctgatcagttcaagcgggaggaggatttctactacacagaggtgcagctgaaggaggaatctgctgctgctgctgctgctgctgccgcaggcaccccagtccctgggactcccacctccgagccagctcccacccccagcatgactggcctgcctctgtctgctcttccaccacctctgcacaaagcccagtcctccggcccagaacatcctggcccggagtcctccctgccctcaggggctctcagcaagtcagctcctgggtccttctggcacattcaggcagatcatgcataccaggctctgccatccttccagatcccagtctcaccacacatctacaccagtgtcagctgggctgctgccccctccgccgcctgctctctctctccggtccggagccggtcgctaagcttcagcgagccccagcagccagcacctgcgatgaaatctcatctgatcgtcacttctccaccccgggcccagagtggtgccaggaaagcccgaggggaggctaagaagtgccgcaaggtgtatggcatcgagcaccgggaccagtggtgcacggcgtgccggtggaagaaggcctgccagcgctttctggactgagctgtgctgcaggttctactctgttcctggccctgccggcagccactgac

SEQ ID NO: 223 - DNA, 4063 bp, Homo sapiens
  CDS (158)..(2479)
tgccgtaccggtccggaattcccgggtcgacgatttcgtggcagttggcgtaggtgcattcggagtgcggctgaggtaactaccgagtcttcggcggaggtaactaccgagtcttcggcgggctcgcgagcccggccgcggcctgctggtttcagtgatggctcatgaagcaatggaatatgatgttcaggtgcagttaaatcatgccgaacaacagccagctcctgctggcatggccagcagccaagggggaccagccctcctccagcctgttcctgctgatgtggtcagcagccagggggtaccatccatcctccagccagctcctgctgaggtgatcagcagccaagcgacaccacccctgctccagcctgctccgcaactgtctgttgacctgacagaagtggaggtcttgggagaagacaatgtggagaacatcaatccaagaacttcagaacaacataggcagggatctgatggtaatcacaccatcccagcatcttcgttgcattcaatgaccaacttcatcagcggactgcagagacttcatggcatgctggaattcctgagaccttcatcttcaaaccacagtgtagggccaatgagaacaagaaggagggtatctgcttcacggagggcaagagccggagggtctcagaggacagacagtgccaggttgagagcaccattggatgcttactttcaggtgagcaggacccagcctgacttgccagctaccacttatgattcagagactaggaatcctgtatctgaagagttgcaggtgtctagtagttctgattctgacagtgacagctctgcagagtatggaggggttgttgaccaggcagaggaatctggagctgtcattttagaagagcaactagcaggtgtctcagcagagcaagaagttacatgtatcgatggaggcaagaccctccccaaacagccatctccccagaagtctgagcctctgctaccttctgcttctatggatgaggaagaaggggacacttgtacaatatgtctggaacagtggaccaatgctggggaccaccggctctcagcattacgctgtgggcatctctttgggtataggtgcatttccacgtggcttaaaggacaagtacgaaaatgtccccagtgcaacaagaaagccaggcacagtgacattgtcgtcctttatgcccgaaccctgagagctttggacactagtgaacaggagcgcatgaaaagttccctactgaaggaacagatgctaaggaaacaggccgagttagaatcagcacagtgccgactccaactgcaggtcctcactgataagtgcactaggcttcaaaggcgtgttcaggacttgcaaaaacttacgtcacatcaaagtcagaatttacagcaacccaggggctcccaagcatgggtcctgagctgctcaccctccagccagggccagcacaagcacaagtaccacttccaaaagaccttcacagtatctcaggcaggaaactgccggatcatggcatactgtgatgctctgagctgcctggtgatatcacagccttctcctcaggcctcttttcttccaggctttggtgttaagatgttgagtactgccaacatgaagagcagtcagtacattccgatgcatggcaaacagatccgtggactggcgtttagcagttacctcagaggcttgctactctctgcttccctagacaacactattaaactgaccagcctggagacaaataccgtggtccagacttataatgctggacgtcctgtctggagctgttgctggtgtcttgatgagactaactacatctatgctggactagccaatggttcaattctggtatatgacgtgcgaaacacgagcagtcatgtgcaggagttagtagctcagaaagccagatgcccactggtctccctgtcatacatgcccagagctgcctcagctgcatttccatatggtggggtgctggctggaaccttggaggatgcttcattctgggaacagaaaatggacttttctcattggcctcatgtgctgcccttggagccagggggctgcatagactttcagacagagaacagctcccggcactgtcttgtgacctacaggcctgataaaaatcacaccaccatacgaagtgtgctgatggaaatgtcctaccgactggatgacactggaaatccaatctgctcctgccagcctgtacatacattttttggaggacctacttgcaaactattgaccaaaaatgccattttccaaagcccagagaatgatggcaacatcctggtgtgtactggggatgaagcagcaaattctgccctgctgtgggatgctgccagtggctcgttgctccaggacctacagaccgatcagcctgtgttggacatctgcccatttgaggtgaaccgtaacagctacttggctaccttaacagagaagatggtccacatctataagtgggagtgactgtggtctcgaaaccttgaaggcatgctgctggttagatgttgtttgctagcgcctagcagccccaagcaagatccctgtttattgtctgcagtctagaacattgggaatcatggtttgtttgcattagtatgattctaggaccctaggtcactgagacactacagattgtgtatctgttatgtccactaaaagagtaattgatgggtactttatctacattatccatttcttgggtttaaagccttcattaaccattattgtatgttggaaattcttattttctttattttctgtgtgactttctggaccttagagagtgtcctctcatcatctaggaagtgagtgggcatcaagcattttctggggaatatgacatcccatctgagttgtcctgtcacttaggtatccttgaagggactaaacatcgtcttggtactgatttgatgcaacgtagatgtaaaagagtattattcagttgaacacaagagggcactgtagaaccttgtgtccggtttatttctgaccttgaaggctgacaatcttttagtaacttgtctcatctccacacaagtgtgtgatagcacacctgggtgtgctttgtggcaataacacttgtgttccaggtgtgaagtgctgggacattggcaggcccagtgatggaagcagctagtgaacgattccctttgctaatgcctagtgcattaagttcattgctttgcgaaaggtaaggaaagaggccagttgtttgagcggtggggaagattttgttttttctagccagcttaggatctcaggattggttttatccaagctagtgctttgaagaacactatctcttgccaggaaaagatgagtgataggtcaaagcttttacttgagtctcccctagtgtcagagatcaggagaaaagacataagagaatttacaaaagctattcagactgctattgaaaacatgagaagaacttgtctcccattttgagagttcctatctaaataaagccaattcctcagactgaggggctgttcttaagtgttctttatacattccagttatccagttaaagccttccccatgtgaagctgatgtttgattccagtttcctttgatttgcctccctaaccttttctagggctcagtttgtatttctttgccttgcctcagactactttgccaacccacttccacaacagaatatgcttcaagatgtgggcaggtcagtgtcctgttcatgggagaaaatggcttaacagtctgattttctcaaatgattattgaagagttgttatcgtttttattataaaacacttctgacctgtcaattcaagagctgtttctaggatctttctctccggcaaggggttgttgcactagatttccccagagttccaagttctagttgtgccttttaatgaccctttaatattttaggacataattttttccttttttaaatttttttgtagaaatagatgtttcactacgttgtccaggctggtcttggactcctggcctcaagcaatcctcccaaccccatggcctccatgactttttaaaaaaaaaaacaaaaaaaaaaaa

SEQ ID NO: 224 - DNA, 1081 bp, Homo sapiens
  CDS (55)..(621)
gcacgagggggcggcgagaggaaacgcggcgccgggccgggcccggccctggagatggtccccggcgccgcgggctggtgttgtctcgtgctctggctccccgcgtgcgtcgcggcccacggcttccgtatccatgattatttgtactttcaagtgctgagtcctggggacattcgatacatcttcacagccacacctgccaaggactttggtggtatctttcacacaaggtatgagcagattcaccttgtccccgctgaacctccagaggcctgcggggaactcagcaacggtttcttcatccaggaccagattgctctggtggagagggggggctgctccttcctctccaagactcgggtggtccaggagcacggcgggcgggcggtgatcatctctgacaacgcagttgacaatgacagcttctacgtggagatgatccaggacagtacccagcgcacagctgacatccccgccctcttcctgctcggccgagacggctacatgatccgccgctctctggaacagcatgggctgccatgggccatcatttccatcccagtcaatgtcaccagcatccccacctttgagctgctgcaaccgccctggaccttctggtagaagagtttgtcccacattccagccataagtgactctgagctgggaaggggaaacccaggaattttgctacttggaatttggagatagcatctggggacaagtggagccaggtagaggaaaagggtttgggcgttgctaggctgaaagggaagccacaccactggccttcccttccccagggcccccaagggtgtctcatgctacaagaagaggcaagagacaggccccagggcttctggctagaacccgaaacaaaaggagctgaaggcaggtggcctgagagccatctgtgacctgtcacactcacctggctccagcctcccctacccagggtctctgcacagtgaccttcacagcagttgttggagtggtttaaagagctggtgtttggggactcaataaaccctcactgactttttagcaataaagcttctcatcagggttaaaaaaaaaaaaaaaa

SEQ ID NO: 225 - DNA, 2197 bp, Homo sapiens
  CDS (590)..(1927)
ggcagaggcccggaaccgccacgggtgagtcgggtcgtggctgctgccgggtcctgcgcgctccggactgaggtggcgtccctgggccggacggcggtgtcccggcgtggcgggaagccggcactggagcgggagcgcactgggcgcgggaccgggaggcgcagggaccggacggctcccgagtcgcccacctgacggtaccgagagggcggcgcccctccgagcagagccgtcccggccactcccctgggatctgacttggctcttgcggtcgcgggcaccgtgaagccctggggtgtgcgtggctcctcctggtaggcgccctttcccggcgtccggcttggggtggtggtggcgttgactccagccccgcctctccctggagaggagggctccactcgctccttcggcctcctcccctggggccgcagcgactcgggccggcttcctgcttccctgcctgccggcggtcccgctggctagaagaagtcttcacttcccaggagagccaaagcgtgtctggccctaggtgggaaaagaactggctgtgacctttgccctgacctggaagggcccagccttgggctgaatggcagcacccacgcccgcccgtccggtgctgacccacctgctggtggctctcttcggcatgggctcctgggctgcggtcaatgggatctgggtggagctacctgtggtggtcaaagagcttccagagggttggagcctcccctcttacgtctctgtgcttgtggctctggggaacctgggtctgctggtggtgaccctctggaggaggctggccccaggaaaggacgagcaggtccccatccgggtggtgcaggtgctgggcatggtgggcacagccctgctggcctctctgtggcaccatgtggccccagtggcaggacagttgcattctgtggccttcttagcactggcctttgtgctggcactggcatgctgtgcctcgaatgtcactttcctgcccttcttgagccacctgccacctcgcttcttacggtcattcttcctgggtcaaggcctgagtgccctgctgccctgcgtgctggccctagtgcagggtgtgggccgcctcgagtgcccgccagcccccatcaacggcacccctggccccccgctcgacttccttgagcgttttcccgccagcaccttcttctgggcactgactgcccttctggtcgcttcagctgctgccttccagggtcttctgctgctgttgccgccaccaccatctgtacccacaggggagttaggatcaggcctccaggtgggagccccaggagcagaggaagaggtggaagagtcctcaccactgcaagagccaccaagccaggcagcaggcaccacccctggtccagaccctaaggcctatcagcttctatcagcccgcagtgcctgcctgctgggcctgttggccgccaccaacgcgctgaccaatggcgtgctgcctgccgtgcagagcttttcctgcttaccctacgggcgtctggcctaccacctggctgtggtgctgggcagtgctgccaatcccctggcctgcttcctggccatgggtgtgctgtgcaggtccttggcagggctgggcggcctctctctgctgggcgtgttctgtgggggctacctgatggcgctggcagtcctgagcccctgcccgcccctggtgggcacctcggcgggggtggtcctcgtggtgctgtcgtgggtgctgtgtcttggcgtgttctcctacgtgaaggtggcagccagctccctgctgcatggcgggggccggccggcattgctggcagccggcgtggccatccaggtgggctctctgctcggcgctgttgctatgttccccccgaccagcatctatcacgtgttccacagcagaaaggactgtgcagacccctgtgactcctgagcctgggcaggtggggaccccgctccccaacacctgtctttccctcaatgctgccaccatgcctgagtgcctgcagcccaggaggcccgcacaccggtacactcgtggacacctacacactccataggagatcctggctttccagggtgggcaagggcaaggagcaggcttggagccagggaccagtgggggctgtagggtaagcccctgagcctgggacctacatgtggtttgcgtaataaaacatttgtatttaaaaaaaaaaaaaaa

SEQ ID NO: 226 - DNA, 747 bp, Homo sapiens
  CDS (348)..(704)
gtcataggatcggacaggaaaggtgcgaaaacataaaagtcagtccaatgacaaaggataaaaggtgtgattcgtatagacacccaagaaggcattgcacaccaagaacgtaaagctcgaaaaaagaattttattaaggtaaaggatttgaggttacatgtggaaaggcctggatattatttcttcgcaaaatattaggttgatcaacgggccactaaaatactggtggatcgctttgcccttggcaaggcttaattttagacatctttagcaagggttggcttaaatttgctattctttatagggcaagtctctcagtgttgagatgcagtgcttactcctaaaatatgatccttatggtatttcagtggaaatatacaagtttaccaaggtcttctaccttgatggactggaacttgcaattctctttgctactgtgggcaactgctgacatctctgatcagctctttcaacctccacagaagttttcctgggatcctctggagagtgccctgtgcttgtacagttcagggtcagccaaggatttgaagggagaaatgcagagcttttggtacccagcccgcaaatccccaccactccatctccccgctctgcagctcttttattttggggagctcccatgtaaatttttacctgctctggttgtcccaggctccaccctcccaccctccaggccactgtgaacatctggtgtgtgccatgtctgcatccacacgactgaatact

SEQ ID NO: 227 - DNA, 602 bp, Homo sapiens
  CDS (97)..(354)
taggtaccgctccggaattcccgggtcgacccacgcgtccgcccacgcgtccggtgacaatctcagagcagcttctacaccacagccatttccagcatgaagatcactgggggtctccttctgctctgtacagtggtctatttctgtagcagctcagaagctgctagtctgtctccaaaaaaagtggactgcagcatttacaagaagtatccagtggtggccatcccctgccccatcacatacctaccagtttgtggttctgactacatcacctatgggaatgaatgtcacttgtgtaccgagagcttgaaaagtaatggaagagttcagtttcttcacgatggaagttgctaaattctccatggacatagagagaaaggaatgatattctcatcatcatcttcatcatcccaggctctgactgagtttctttcagttttactgatgttctgggtgggggacagagccagattcagagtaatcttgactgaatggagaaagtttctgtgctacccctacaaacccatgcctcactgacagaccagcattttttttttaacacgtcaataaaaaaataatctcccagaaaaaaaaaaaaaaaa

SEQ ID NO: 228 - DNA, 1348 bp, Homo sapiens
  CDS (311)..(1111)
taccgtagacccaagcaggctagcgttgaaacttaagcttggtaccgagctcggatccactagtccagtgtggtggaattcgtgggctgcggcgggcgggctgtggcgctcccgcgcgggtctccgggccctgttccgtagccgcgatgctgcgctatttccaggctgcgagcggggacttcactgctctgctgtctcctgcaagaactggctcaagaaatttgcctcgaaaaccaaaaaaaaggtttggtatgaaagtccttccttgggttctcactcgacttacaaaccatccaagttggaattcctcatgaggagcacctcaaagaaaaccaggaaggaagaccatgcgcgcctgagggccctgaacggcctcctctataaggcactgacagacctgctgtgtacccctgaagtgagtcaggagctgtatgaccttaacgtggagctctccaaggtttccctgactccagacttctcagcctgccgagcgtactggaagacaacgctctctgctgagcagaacgcacacatggaggctgtcctgcagagaagtgccgcgcacatgaggcaccttttgatgtcccagcagaccctgaggaatgtgccaccgatagtgtttgttcaagacaagggaaatgcagctctagctgagcttgatcagttactggcagtcgcagactttggaccccgggatgaaagagacaactttgtacaaaatgatttcagggaccctgatgccccacaaccctgcggcaccacagagccgaccacaagctccagtctgtgtgggatcgatcatgaggcgctccacaagcagattatggagtacaaaaggaggaaagataaagggctcgggggcctggtgtggcaggggcaggtggctgagctgacaacgcagatgaaaaagggaaggaagagggccaagccccgcctggagcaggacagctccctcaagagttacctgtcaggcgaggaggttgaagatgacctggacctggttggtgccccggagtacgaatgctatgccccggacacagaggagttggaggcagagagaggaggtggcagaacagaggatggccacagctgcggagcaagcagggagtagatggagaggctctgcccatcccacatttgcagggaaaagcattggcacgcaacgcagcatgtggcttcattgaggcagttgatggagttaaaccatctgctcttctgctacttcaacattttctagcttttccgtgtatctaaacacaatttgctacacaagtcactgtttttttttccatgcactgtgtgtaatttaaaaattaaatggccatcttatcacaaaaaaaaaaaaaaa

SEQ ID NO: 229 - DNA, 2627 bp, Homo sapiens
  CDS (299)..(1342)
  misc_feature (1)...(2627): n = a,t,c or g
tattcagacttctgatccagaaaattttcagtctgaagaacgatcagactcagatgtgaataatgacaggagtacaagttcagtggacagtgatattcttagctccagtcatagcagtgatactttgtgcaatgcagacaatgctcagatccctttggctaatggacttgactctcacagtatcacaagtagtagaagaacgaaagcaaatgaagggaaaaaagaaacatgggatacagcagaagaagactctggaactgatagtgaatatgatgagagtggcaagagtaggggagaaatgcagtacatgtatttcaaagctgaaccttatgctgcagatgaaggttctggggaaggacataaatggttgatggtgcatgttgataaaagaattactctggcagctttcaaacaacatttagagccctttgttggagttttgtcctctcacttcaaggtctttcgagtgtatgccagcaatcaagagtttgagagcgtccggctgaatgagacactttcatcattttctgatgacaataagattacaattagactggggagagcacttaaaaaaggagaatacagagttaaagtataccagcttttggtcaatgaacaagagccatgcaagtttctgctagatgctgtgtttgctaaaggaatgactgtacggcaatcaaaagaggaattaattcctcagctcagggagcaatgtggtttagagctcagtattgacaggtttcgtctaaggaaaaaaacatggaagaatcctggcactgtctttttggattatcatatttatgaagaagatattaatatttccagcaactgggaggttttccttgaagttcttgatggggtagagaagatgaagtccatgtcacagcttgcagttttgtcaagacggtggaagccttcagagatgaagttggatcccttccaggaggttgtattggaaagcagtagtgtggacgaattgcgagagaagcttagtgaaatcagtgggattcctttggatgatattgaatttgctaagggtagaggaacatttccctgtgatatttctgtccttgatattcatcaagatttagactggaatcctaaagtttctaccctgaatgtctggcctctttatatctgtgatgatggtggggtcatattttatagggataaaacagaagaattaatggaattgacagatgagcaaagaaatgaactgatgaaaaaagaaagcagtcgactccagaagactggacatcgtgtaacatactcacctcgtaaagagaaagcactaaaaatatatctggatggagcaccaaataaagatctgactcaagactgactctgatagtgtagcattttccctgggggagttttggttttaattagatggttcactaccactgggtagtgccattttggccggacatggttggggtaacccagtgacaccagcactgattggactgccctacaccaatcagaagctcagtgcccaatgggccactgttttgactcggaatcatgttgtgcactatagtcaaatgtactgtaaagtgaaaagggatgtgcaaaaaaataaaaaaaaacaacaaaaaaagctaaccttctattagaaaaggggacaggggaatgagtaaacttcttttattgcggacaaatgtgcacatagccgctagtaaaactagcctcaaacaggatgctcatagcttaataataaaagctgtgcaaaggccatgaatgaatgaattttctgtttatttcactgatgcacacattacctcattgacaattcagaagtaaatccaacgtgtgttgactcttggaaagcagcaaaaacaggagctgaagaaaagaaattcttggaaccagccgtaacccagtaaggaattgtgaagttgtgtttttattttgtttcattttttgcagagtattaagaacattattctggaacatcagaacgtttcccttagaccgatcccagcaggtggcagctcagattgctgcagtgttgtaattataactgattgtacttaagttatggatgtagagaatatgtttcattcatttattcagcatgtaaataaaattgatcctgttgagttatcataattgcagtttcancatctgccatgattattcttttcacgtatcattcattctgtacatttgtgtacattgagaagtatagcaatctatgtaaatgtaatcctcagtgaggttcctcagtgctaggtcccataggattgtcgttgcccttgttaatgaggtttctctgttcagcggcttcaatttttttctctttgtacatctagttttgaagatttacttcaagtttgaatcttctagaatgcttgtaagtccagttttaatttttagagtcaatttgtagttacatgtagtttaacttttgggaaacgtcttaacattgttctgagaataaacttgctaatgaggtcaggtcatggtacagactgatgcagtcaacatgatttcattgcagagtttattagtatcagcaagtttttgctttgctaaataaaagtactcaatgaacacaattctacataaattttgacataccatctaatttataaaaatcaataaaaaaggttttggtaaaaaaa

SEQ ID NO: 230 - DNA, 647 bp, Homo sapiens
  CDS (192)..(506)
atacgactcactatagggaatttggccctcgaggccaagaattcggcacgaggcatcagctcgtagggactgagccagggttggagtccagactgacttgctggatctgcagctttctccttttcagcactgctgggttctatcgtgagaacagatgggctcatggccatgacggttaggaggtctgccttatgctagctcatctctcctttgagcgtagcctgatccttcatcttattttctcaggcatagcagtgtccataaaggccctaacaaagacttggatgcccccagagatggggagctcaccagtctataaggctttcagccttctccagtgcaggctctctgcacagaaatggggctcctgccactcccagaacacccttcactggcctgtgtggggtcctcagaccacccttccaagttcccaagccagctttgttggctgggcccatagtcattcccccttggctgttcctgcgtcttctgactgtgtcctctaaatgccctctggacctggaagtttttttggacaaagggctcaggggcggactcaaagctaccagggggggggggggggctcttaacttctcccctctgggacacaagcacggcacacacgcgcgtgaagggggcttttattt

SEQ ID NO: 231 - DNA, 980 bp, Homo sapiens
  CDS (133)..(453)
atttggccctcgaggccaagaattcggcacgagctggctatctacatggaagggtagggtttatgacggcaatacacaatagaagatgcctttggcaagaccgctgctctccttagagagaatatcttgccaatggctttgcttcatatctgcgtggggcaccctctcctttccttccccaaggctggggacttttctttttcatctcaagatgacccctctgagctgacagcaggagccaaagacaaagaattttcttgccttctcgttatctgcctccaacccgccccgagcactcgttccctcttctcttggcagctatttttgctcagtttctctctggtttcttttactttgatttataggggtgaatttaagaaatctggtgaggctaaggactatttgacccaagtccagggacccatagactgtgggaaactcttagctacatgaaaaaatgcagccgctaaacacaacttgttgccctaagcactcagccactgcttacttgagcgagcttgtcaatcgcaaccttccagaagcatagtctccaggctctcagctgcagctgccaggccacagggggcactgtgggtaccgcctggatgcatgctgagtgatgcagaggcctccactcactcgttcaggggctgatgacgtgggttctcttttccctgttgtcgtgtgacagggccatttgaccatctcactaattcccaacacggagttatccaaccagtcttcatatttaccagtttctggaatacccaagtgccttaggacataggaggtgccctgtgaaggttgatgtcattaaaaaatttgaaacaccctatttgatcagagtttatggtcaaaaatcagatgtttgggggagaacaggaacctggctaagttactgaaataatgaactaaaaattgaccttacttggaaaaatccaagacttctcgtgccgaattcttggcctcgagggccaaat

SEQ ID NO: 232 - DNA, 673 bp, Homo sapiens
  CDS (153)..(428)
gcaggcaccggtccggaattcccgggtcgacccacgcgtccgatgttacgtgggttgtaaatgtaattgttaatattatttaaaaatttttgaaaagtgatttttagtggtggccttatcatatctacatattattactccaccattttgggatgtttaggtcgaatcctggttttttcttcttttgctgttgtaagtcatgtatattggcaattagcctaggagagattcctagaaatgagttcactgagaatatgagcttaagagaaagtgaggatttaaagccagatctgtctgccttcaaatccagcgctctttatactgatgtgagttctcctgtcttttttacctatcagaattctagaactctcccagagaaaccaggcagatactgctccacaccggtgagctgcttctcacctgggtagtctagggtggtttgctccagaattgtatttctgctttttctttttttaacttggcaggggttaaccattccctggagcagcaccaggtaagtcagcttgtatcagagtcatctgctttacctgacatgagcacacgttgtcatatatttgcacatgcagatatcatatgttaaacaatatcccattgttgaagaaaattacactggaaagcgtaaaatatagcttggatgccacattgagtggac

SEQ ID NO: 233 - DNA, 698 bp, Homo sapiens
  CDS (146)..(382)
cgttggtacccctgcggtaccgctccggaattcccgggtcgacccacgcgtccgatttaagagtatgtgcttaaacagtttaatagtgcatgtgcgttggaacttttaaaaataagtcatatggatacagggctgctgcttagggatgtgcaggttatacagttgtgcaaggatgccattgttctccactgttctcttttctaatgtttatattaatgatttccttctgcagaaacctgaaaatactacaagccaaccactttctaatcagcgagttgtagaggtggcgatccctcatgtagggaaatttatgattgaatcaaaggagggggggtatgatgacgaggtaccttttacagccctctgcaccattgctacttaacttttgctatttaatacaaatactttgggcatgcctgcaccctcatacttaatgtctattgccacataacatacagctttgccccctcatagtccaaaattactttaccaattattaacagaactttgaatttcaaatgaaaatttaagtagaaaacttatggaatttgtcaaaagaattttctgtttgtggagttaattcttttatgcagaaatagtaccagtttacttccaggttggcagattacaataagatttgtttaattagtacaaaaattttttgcatttaaaaataattttttatattccattcttgc

SEQ ID NO: 234 - DNA, 570 bp, Homo sapiens
  CDS (182)..(520)
ggtaccgctccggaattaccgggtcgacccacgcgtccgaaagagctaagggaatggggaagtttcaacatcatgggactattgaactgtaattcagaagacacagtcaaataaaactacaagtagaagctcggagaaaaagctgctgccttctcagctgctacgaggtgaggagtcagggatggggattcaatggacatgtgaatggccgtcgtctctgtcacctgggtggaagttcatagcatgtctctggttctccatgtgggggtcacgccctccactttctcaagctatgagtcacaagcaatggcccatgctgtgtagctccatttctaacccggaagcttctggaacggaactgttcacctaccattttcatatgatgggatacattgaaaggttttggccgacagaagaattagctcaacgctgtagtttgcataaagagctgccctgcactgtgttcacagagaagcactgctcttgcactttcctcatggtgtttggggtttgcacatgagacttagctcatgtggctaagcccatgggtttccaggcgaaagaaaaggc

SEQ ID NO: 235 - DNA, 3212 bp, Homo sapiens
  CDS (82)..(2106)
tttgacgatagaacgccttacgtaccgagccggaattcccgagtcgacccacgcgtgcgcccacgcgttcgcgcaggaaacatggcgtcggcgggtgttgtgagcgggaagattatatatgaacaagaaggagtatatattcactcatcttgtggaaagaccaatgaccaagacggcttgatttcaggaatattacgtgttttagaaaaggatgccgaagtaatagtggactggagaccattggatgatgcattagattcctctagtattctctatgctagaaaggactccagttcagttgtagaatggactcaggccccaaaagaaagaggtcatcgaggatcagaacatctgaacagttacgaagcagaatgggacatggttaatacagtttcatttaaaaggaaaccacataccaatggagatgctccaagtcatagaaatgggaaaagcaaatggtcattcctgttcagtttgacagacctgaaatcaatcaagcaaaacaaagagggtatgggctggtcctatttggtattctgtctaaaggatgacgtcgttctccctgctctacactttcatcaaggagatagcaaactactgattgaatctcttgaaaaatatgtggtattgtgtgaatctccacaggataaaagaacacttcttgtgaattgtcagaataagagtctttcacagtcttttgaaaatcttcttgatgagccagcatatggtttaatacaaaaaattaaaaaggacccttatacggcaactatgataggattttccaaagtcacaaactacatttttgacagtttgagaggcagcgatccctctacacatcaacgaccaccttcagaaatggcagattttcttagtgatgctattccaggtctaaagataaatcaacaagaagaaccaggatttgaagtcatcacaagaattgatttgggggaacgccctgttgttcaaaggagagaaccggtatcactggaagaatggactaagaaaattgattctgaaggaagaattttaaatgtagataatatgaagcagatgatatttagagggggacttagtcatgcattgagaaagcaagcatggaaatttcttctgggttattttccctgggacagtaccaaggaggaaagaacccaattacaaaagcaaaaaactgatgaatacttcagaatgaaactgcagtggaaatccatcagccaggaacaagagaaaagaaattcgaggttaagagattatagaagtcttatcgaaaaagatgttaacagaacagatcgaacaaacaagttttatgaaggccaagataatccagggttgattttacttcatgacattttgatgacctactgtatgtatgattttgatttaggatatgttcaaggaatgagtgatttactttcccctcttttatatgtgatggaaaatgaagtggatgccttttggtgctttgcctcttacatggaccaaatgcatcagaattttgaagaacaaatgcaaggcatgaagacccagctaattcagctgagtaccttacttcgattgttagacagtggattttgcagttacttagaatctcaggactctggatacctttatttttgcttcaggtggcttttaatcagattcaaaagggaatttagttttctagatattcttcgattatgggaggtaatgtggaccgaactaccatgtacaaatttccatcttcttctctgttgtgctattctggaatcagaaaagcagcaaataatggaaaagcattatggcttcaatgaaatacttaagcatatcaatgaattgtccatgaaaattgatgtggaagatatactctgcaaggcagaagcaatttctctacagatggtaaaatgcaaggaattgccacaagcagtctgtgagatccttgggcttcaaggcagtgaagttacaacaccagattcagacgttggtgaagacgaaaatgttgtcatgactccttgtcctacatctgcatttcaaagtaatgccttgcctacactctctgccagtggagccagaaatgacagcccaacacagataccagtgtcctcagatgtctgcagattaacacctgcatgatcactgttcttgctttttgggaagagacactttgttgcaaccctttttcaagtacttgaaagttgaaaatttgaaatcttggtattgatcatgctttaaggtttatgtaaagaaagtgtactgatgttcttacattaaagctttacaaagatttaaactaattatttttgtagttacttctaccaaatagcctttccttttcgataacattcctcagtatttttatagccaagtacattttattttcttgctgatgaactggaattggataaatattgcaagtggatgagttggaaattatgcactttgaaaaacattcactttgtttaagcttattgggtttcagatttgattaaattaaatgtggaggctttctatagcattctaagctgagaagtagattgttacccagtaatgaaataaaaaataaaaataaaaggatttttttctctattgtttacgacagtactcagcttaaatatttatgctggtcaaatgtgatttaaattggacattttcatcaatgcagtctaatgtgtagataaatatttcaaccataataagtggattggcagtatattttttacattgaacttttcttcacttgtatataaagattatatataagtacttatttatgagtataagaaaggttaggcatattttcattaactgaataaacgacttgatttatataacctggtttatcaaaatttaacatggcttcagtatgagatctttttcaaaactattttcttaaacatttatttcatgagattatgttcaaccctgtacctggtgtaattttaaaattaattgcttgtaacctcactttactaataatgtttattatctttcctaataatgcattaactgattaatcaggtgtttaaatttttataaaatactcttgcaaaaagtttatttgaaaaatttctagatggtctcatgagtttcaaaataataatttttgtgtatgaacaaagctgttgtttttaccatgcagtattgcatgattttaagttatgtggaattaacataactgattttgttttaattgtaagttgttaactcctgtatatatcattaaaataaatctgaagttg

SEQ ID NO: 236 - DNA, 894 bp, Homo sapiens
  CDS (204)..(548)
gagatccttatggacttgcactggtgtctgcatatttgaagaagtagtcaccttcccagtctttacagaggagctttaacataggaagccctttaccagtcagcctgtccagagattccggacagcatggctggcatagtccatgagcaggcttgctgcctgacttctccagcaggctagcctcagttactggatccgcaaggatgggtctggagactggttctgtgggatctggcctggtgcctgggtccatgggtgccagcctggcactggggttcactgaggtggttctagtgctggggttcacagtaaagttaggggctcacttgactctccttcctccacttggagggcatctatctccatactgtgctgcacaggcttgggaaggggtgaaacaattaatgtgcaactgtagttcctatcctcttcaatgcatcatttgttgtatctatgctacacccgggtgctacaatctatcatttggaatccttagctcttgtgaaggtatttttgtctatgagtggttattcgaaatgcttctgtgaagaaacaaatgctgaaaactactattctgacattttactaacatcactcttcctatttaacttttaaatatgatgaagtcactcccttgcttaaaaaatctgatgccatcccatctttcaaaataaaaggcaagcccttacctccaacctccaagactccacatgatctagcccctacacttgtctagcttttctccaactctccccgctaggtacttgcattccattcatattaatcttgcttttctttgaatgcagatctacatgctcacacatgaagtctttgttctagctattccatctgcatagatacagcggccgctctagaggatccaagcttacgtcg

SEQ ID NO: 237 - protein, 468 aa, Homo sapiens [sequence omitted]

SEQ ID NO: 238 - protein, 541 aa, Homo sapiens
MGSQEVLGHAARLASSGLLLQVLFRLITFVLNAFILRFLSKEIVGVVNVRLTLLYSTTLFLAREAFRRACLSGGTQRDWSQTLNLLWLTVPLGVFWSLFLGWIWLQLLEVPDPNVVPHYATGVVLFGLSAVVELLGEPFWVLAQAHMFVKLKVIAESLSVILKSVLTAFLVLWLPHWGLYIFSLAQLFYTTVLVLCYVIYFTKLLGSPESTKLQTLPVSRITDLLPNITRNGAFINWKEAKLTWSFFKQSFLKQILTEGERYVMTFLNVLNFGDQGVYDIVNNLGSLVARLIFQPIEESFYIFFAKVLERGKDATLQKQEDVAVAAAVLESLLKLALLAGLTITVFGFAYSQLALDIYGGTMLSSGSGPVLLRSYCLYVLLLAINGVTECFTFAAMSKEEVDRYNFVMLALSSSFLVLSYLLTRWCGSVGFILANCFNMGIRITQSLCFIHRYYRRSPHRPLAGLHLSPVLLGTFALSGGVTAVSEVFLCCEQGWPARLAHIAVGAFCLGATLGTAFLTETKLIHFLRTQLGVPRRTDKMT

SEQ ID NO: 239 - protein, 276 aa, Homo sapiens
MSSGASRKSWDPGKPWPPDWPITGRKMKVLWAALLVTFLAGCQAKVEQAVETEPEPELRQQTEWQSGQRWELALGRFWDYLRWVQTLSEQVQEELLSSQVTQELRALMDETMKELKAYKSELEEQLTPVAEETRARLSKELQAAQARLGADMEDVCGRLVQYRGEVQAMLGQSTEELRVRLASHLRKLRKRLLRDADDLQKRLAVYQAGAREGAERGLSAIRERLGPLVEQGPRAGRHCGLPGPASRYRSGPRPGASGCARGWRRWAAGPATAWTR

SEQ ID NO: 240 - protein, 554 aa, Homo sapiens
MRRPLSKCGMEPGGGDASLTLHGLQNRSHGKIKLRKRKSTLYFNTQEKSARRRGDLLGENIYLLLFTIALRILNCFLVQTSFVPDEYWQSLEVSHHMVFNYGYLTWEWTERLRSYTYPLIFASIYKILHLLGKDSVQLLIWIPRLAQALLSAVADVRLYSLMKQLENQEVARWVFFCQLCSWFTWYCCTRTLTNTMETVLTIIALFYYPLEGSKSMNSVKYSSLVALAFIIRPTAVILWTPLLFRHFCQEPRKLDLILHHFLPVGFVTLSLSLMIDRIFFGQWTLVQFNFLKFNVLQNWGTFYGSHPWHWYFSQGFPVILGTHLPFFIHGCYLAPKRYRILLVTVLWTLLVYSMLSHKEFRFIYPVLPFCMVFCGYSLTHLKTWKKPALSFLFLSNLFLALYTGLVHQRGTLDVMSHIQKVCYNNPNKSSASIFIMMPCHSTPYYSHVHCPLPMRFLQCPPDLTGKSHYLDEADVFYLNPLNWLHREFHDDASLPTHLITFSILEEEISAFLISSNYKRTAVFFHTHLPEGRIGSHIYVYERKLKGKFNMKMKF

SEQ ID NO: 241 - protein, 365 aa, Homo sapiens
MSLLGFLLSRLGLLLKVLLDWPVEVLYGAAALNGLFGGFSAFWSGVMALGSLGSSEGRRSVRLILIDLMLGLAGFCGSMASGHLFKQMAGHSGQGLILTACSVSCASFALLYSLLVLKVPESVAKPSQELPAVDTVSGTVGTYRTLDPDQLDQQYAVGHPPSPGKAKPHKTTIALLFVGAIIYDLAVVGTVDVIPLFVLREPLGWNQVQVGYGMAAGYTIFITSFLGVLVFSRCFRDTTMIMIGMVSFGSGALLLAFVKETYMFYIARAVMLFALIPVTTIRSAMSKLIKGSSYGKVFVILQLSLALTGVVTSTLYNKIYQLTMDMFVGSCFALSSFLSFLAIIPISIVAYKQVPLSPYGDIIEK

SEQ ID NO: 242 - protein, 247 aa, Homo sapiens
MFLFLFFLVAILPVNTEGGEIIWGTESKPHSRPYMAFIKFYDSNSEPHHCGGFLVAKDIVMTAAHCNGRNIKVTLGAHNIKKQENTQVISVVKAKPHENYDRDSHFNDIMLLKLERKAQLNGVVKTIALPRSQDWVKPGQVCTVAGWGRLANCTSSNTLQEVNLEVQKGQKCQDMSEDYNDSIQLCVGNPSEGKATGKGDSGGPFVCDGMAPGHWQLSAWVLGTLSREFPQNLQLLYRGFRKPMKGP

SEQ ID NO: 243 - protein, 1464 aa, Homo sapiens
MFSFVDLRLLLLLAATALLTHGQEEGQVEGQDEDIPPITCVQNGLRYHDRDVWKPEPCRICVCDNGKVLCDDVICDETKNCPGAEVPEGECCPVCPDGSESPTDQETTGVEGPKGDTGPRGPRGPAGPPGRDGIPGQPGLPGPPGPPGPPGPPGLGGNFAPQLSYGYDEKSTGGISVPGPMGPSGPRGLPGPPGAPGPQGFQGPPGEPGEPGASGPMGPRGPPGPPGKNGDDGEAGKPGRPGERGPPGPQGARGLPGTAGLPGMKGHRGFSGLDGAKGDAGPAGPKGEPGSPGENGAPGQMGPRGLPGERGRPGAPGPAGARGNDGATGAAGPPGPTGPAGPPGFPGAVGAKGEAGPQGPRGSEGPQGVRGEPGPPGPAGAAGPAGNPGADGQPGAKGANGAPGIAGAPGFPGARGPSGPQGPGGPPGPKGNSGEPGAPGSKGDTGAKGEPGPVGVQGPPGPAGEEGKRGARGEPGPTGLPGPPGERGGPGSRGFPGADGVAGPKGPAGERGSPGPAGPKGSPGEAGRPGEAGLPGAKGLTGSPGSPGPDGKTGPPGPAGQDGRPGPPGPPGARGQAGVMGFPGPKGAAGEPGKAGERGVPGPPGAVGPAGKDGEAGAQGPPGPAGPAGERGEQGPAGSPGFQGLPGPAGPPGEAGKPGEQGVPGDLGAPGPSGARGERGFPGERGVQGPPGPAGPRGANGAPGNDGAKGDAGAPGAPGSQGAPGLQGMPGERGAAGLPGPKGDRGDAGPKGADGSPGKDGVRGLTGPIGPPGPAGAPGDKGESGPSGPAGPTGARGAPGDRGEPGPPGPAGFAGPPGADGQPGAKGEPGDAGAKGDAGPPGPAGPAGPPGPIGNVGAPGAKGARGSAGPPGATGFPGAAGRVGPPGPSGNAGPPGPPGPAGKEGGKGPRGETGPAGRPGEVGPPGPPGPAGEKGSPGADGPAGAPGTPGPQGIAGQRGVVGLPGQRGERGFPGLPGPSGEPGKQGPSGASGERGPPGPMGPPGLAGPPGESGREGAPGAEGSPGRDGSPGAKGDRGETGPAGPPGAPGAPGAPGPVGPAGKSGDRGETGPAGPAGPVGPVGARGPAGPQGPRGDKGETGEQGDRGIKGHRGFSGLQGPPGPPGSPGEQGPSGASGPAGPRGPPGSAGAPGKDGLNGLPGPIGPPGPRGRTGDAGPVGPPGPPGPPGPPGPPSAGFDFSFLPQPPQEKAHDGGRYYRADDANVVRDRDLEVDTTLKSLSQQIENIRSPEGSRKNPARTCRDLKMCHSDWKSGEYWIDPNQGCNLDAIKVFCNMETGETCVYPTQPSVAQKNWYISKNPKDKRHVWFGESMTDGFQFEYGGQGSDPADVAIQLTFLRLMSTEASQNITYHCKNSVAYMDQQTGNLKKALLLQGSNEIEIRAEGNSRFTYSVTVDGCTSHTGAWGKTVIEYKTTKTSRLPIIDVAPLDVGAPDQEFGFDVGPVCFL

SEQ ID NO: 244 - protein, 307 aa, Homo sapiens
MTKAGSKGGNLRDKLDGNELDLSLSDLNEVPVKELAALPKATILDLSCNKLTTLPSDFCGLTHLVKLDLSKNKLQQLPADFGRLVNLQHLDLLNNKLVTLPVSFAQLKNLKWLDLKDNPLDPVLAKVAGDCLDEKQCKQCANKVLQHMKAVQADQERERQRRLEVEREAEKKREAKQRAKEAQERELRKREKAEEKERRRKEYDALKAVKREQEKKPKKEANQAPKSKSGSRPRKPPPRKHTRSWAVLKLLLLLLLFGVAGGLVACRVTELQQQPLCTSVNTIYDNAVQGLRRHEILQWVLQTDSQQ

SEQ ID NO: 245 - protein, 223 aa, Homo sapiens [sequence omitted]

SEQ ID NO: 246 - protein, 83 aa, Homo sapiens
MRRSFWTVMRTAWRCSCSSVDRALSHQAGLQGQCLSACLLGNLGYPPFISPPAQVLCAARASCHLGSLMAILRLWFTVKIGPV

SEQ ID NO: 247 - protein, 319 aa, Homo sapiens
MLFWVLGLLILCGFLWTRKGKLKIEDITDKYIFITGCDSGFGNLAARTFDKKGFHVIAACLTESGSTALKAETSERLRTVLLDVTDPENVKRTAQWVKNQVGEKGLWGLINNAGVPGVLAPTDWLTLEDYREPIEVNLFGLISVTLNMLPLVKKAQGRVINVSSVGGRLAIVGGGYTPSKYAVEGFNDSLRRDMKAFGVHVSCIEPGLFKTNLADPVKVIEKKLAIWEQLSPDIKQQYGEGYIEKSLDKLKGNKSYVNMDLSPVVECMDHALTSLFPKTHYAAGKDAKIFWIPLSHMPAALQDFLLLKQKAELANPKAV

SEQ ID NO: 248 - protein, 240 aa, Homo sapiens
MSVPTMAWMMLLLGLLAYGSGVDSETVVTQEPSFSVSPGGTVTLTCGLNSGSVSDSFYPSWHQQTPGQPPRTLIYNTHIRASGVSDRFSGSIVGNKAALTITGAQADDECVYYCVLYMGNDISLFGGGTRLTVLGQPKAAPSVTLFPPSSEELQANKATLVCLISDFYPGAVTVAWKADSSPVKAGVETTTPSKQSNNKYAASSYLSLTPEQWKSHKSYSCQVTHEGSTVEKTVAPTECS

SEQ ID NO: 249 - protein, 1194 aa, Homo sapiens
MNCDVLWCVLLLVCMSLFSAVGHGLWIWRYQEKKSLFYVPKSDGSSLSPVTAAVYSFLTMIIVLQVLIPISLYVSIEIVKACQVYFINQDMQLYDEETDSQLQCRALNITEDLGQIQYIFSDKTGTLTENKMVFRRCTVSGVEYSHDANAQRLARYQEADSEEEEVVPRGGSVSQRGSIGSHQSVRVVHRTQSTKSHRRTGSRAEAKRASMLSKHTAFSSPMEKDITPDPKLLEKVSECDKSLAVARHQEHLLAHLSPELSDVFDFFIALTICNTVVVTSPDQPRTKVRVRFELKSPVKTIEDFLRRFTPSCLTSGCSSIGSLAANKSSHKLGSSFPSTPSSDGMLLRLEERLGQPTSAIASNGYSSQADNWASELAQEQESERELRYEAESPDEAALVYAARAYNCVLVERLHDQVSVELPHLGRLTFELLHTLGFDSVRKRMSVVIRHPLTDEINVYTKGADSVVMDLLQPCSSVDARGRHQKKIRSKTQNYLNVYAAEGLRTLCIAKRVLSKEEYACWLQSHLEAESSLENSEELLFQSAIRLETNLHLLGATGIEDRLQDGVPETISKLRQAGLQIWVLTGDKQETAVNIAYACKLLDHDEEVITLNATSQEACAALLDQCLCYVQSRGPQRAPEKTKGKVSMRFSSLCPPSTSTASGRRPSLVIDGRSLAYALEKNLEDKFLFLAKQCRSVLCCRSTPLQKSMVVKLVRSKLKAMTLAIGDGANDVSMIQVADVGVGISGQEGMQAVMASDFAVPKFRYLERLLILHGHWCYSRLANMVLYFFYKNTMFVGLLFWFQFFCGFSASTMIDQWYLIFFNLLFSSLPPLVTGVLDRDVPANVLLTNPQLYKSGQNMEEYRPRTFWFNMADAAFQSLVCFSIPYLAYYDSNVDLFTWGTPIVTIALLTFLLHLGIETKTWTWLNWITCGFSVLLFFTVALIYNASCATCYPPSNPYWTMQALLGDPVFYLTCLMTPVAALLPRLFFRSLQGRVFPTQLQLARQLTRKSPRRCSAPKETFAQGRLPKDSGTEHSSGRTVKTSVPLSQPSWHTQQPVCSLEASGEPSTVDMSMPVREHTLLEGLSAPAPMSSAPGEAVLRSPGGCPEESKVRAASTGRVTPLSSLFSLPTFSLLNWISSWSLVSRLGSVLQFSRTEQLADGQAGRGLPVQPHSGRSGLQGPDHRLLIGASSRRSQ

SEQ ID NO: 250 - protein, 1907 aa, Homo sapiens
MAPEPAPGRTMVPLVPALVMLGLVAGAHGDSKPVFIKVPEDQTGLSGGVASFVCQATGEPKPRITWMKKGKKVSSQRFEVIEFDDGAGSVLRIQPLRVQRDEAIYECTATNSLGEINTSAKLSVLEEEQLPPGFPSIDMGPQLKVVEKARTATMLCAAGGNPDPEISWFKDFLPVDPATSNGRIKQLRSGALQIESSEESDQGKYECVATNSAGTRYSAPANLYVRVRRVAPRFSIPPSSQEVMPGGSVNLTCVAVGAPMPYVKWMMGAEELTKEDEMPVGRNVLELSNVVRSANYTCVAISSLGMIEATAQVTVKALPKPPIDLVVTETTATSVTLTWDSGNSEPVTYYGIQYRAAGTEGPFQEVDGVATTRYSIGGLSPFSEYAFRVLAVNSIGRGPPSEAVRARTGEQAPSSPPRRVQARMLSASTMLVQWEPPEEPNGLVRGYRVYYTPDSRRPPNAWHKHNTDAGLLTTVGSLLPGITYSLRVLAFTAVGDGPPSPTIQVKTQQGVPAQPADFQAEVESDTRIQLSWLLPPQERIIMYELVYWAAEDEDQQHKVTFDPTSSYTLEDLKPDTLYRFQLAARSDMGVGVFTPTIEARTAQSTPSAPPQKVMCVSMGSTTVRVSWVPPPADSRNGVITQYSVAYEAVDGEDRGRHVVDGISREHSSWDLVGLEKWTEYRVWVRAHTDVGPGPESSPVLVRTDEDVPSGPPRKVEVEPLNSTAVHVYWKLPVPSKQHGQIRGYQVTYVRLENGEPRGLPIIQDVMLAEAQWRPEESEDYETTISGLTPETTYSVTVAAYTTKGDGARSKPKIVTTTGAVPGRPTMMISTTAMNTALLQWHPPKELPGELLGYRLQYCRADEARPNTIDFGKDDQHFTVTGLHKGTTYIFRLAAKNRAGLGEEFEKEIRTPEDLPSGFPQNLHVTGLTTSTTELAWDPPVLAERNGRIISYTVVFRDINSQQELQNITTDTRFTLTGLKPDTTYDIKVRAWTSKGSGPLSPSIQSRTMPVEQVFAKNFRVAAAMKTSVLLSWEVPDSYKSAVPFKILYNGQSVEVDGHSMRKLIADLQPNTEYSFVLMNRGSSAGGLQHLVSIRTAPDLLPHKPLPASAYIEDGRFDLSMPHVQDPSLVRWFYIVVVPIDRVGGSMLTPRWSTPEELELDELLEAIEQGGEEQRRRRRQAERLKPYVAAQLDVLPETFTLGDKKNYRGFYNRPLSPDLSYQCFVLASLKEPMDQKRYASSPYSDEIVVQVTPAQQQEEPEMLWVTGPVLAVILIILIVIAILLFKRKRTHSPSSKDEQSIGLKDSLLAHSSDPVEMRRLNYQTPGMRDHPPIPITDLADNIERLKANDGLKFSQEYESIDPGQQFTWENSNLEVNKPKNRYANVIAYDHSRVILTSIDGVPGSDYINANYIDGYRKQNAYIATQGPLPETMGDFWRMVWEQRTATVVMMTRLEEKSRVKCDQYWPARGTETCGLIQVTLLDTVELATYTVRTFALHKSGSSEKRELRQFQFMAWPDHGVPEYPTPILAFLRRVKACNPLDAGPMVVHCSAGVGRTGCFIVIDAMLERMKHEKTVDIYGHVTCMRSQRNYMVQTEDQYVFIHEALLEAATCGHTEVPARNLYAHIQKLGQVPPGESVTAMELEFKLLASSKAHTSRFISANLPCNKFKNRLVNIMPYELTRVCLQPIRGVEGSDYINASFLDGYRQQKAYIATQGPLAESTEDFWRMLWEHNSTIIVMLTKLREMGREKCHQYWPAERSARYQYFVVDPMAEYNMPQYILREFKVTDARDGQSRTIRQFQFTDWPEQGVPKTGEGFIDFIGQVHKTKEQFGQDGPITVHCSAGVGRTGVFITLSIVLERMRYEGVVDMFQTVKTLRTQRPAMVQTEDQYQLCYRAALEYLGSFDHYAT

SEQ ID NO: 251 - protein, 93 aa, Homo sapiens [sequence omitted]

SEQ ID NO: 252 - protein, 115 aa, Homo sapiens
METDPASWPQPEPAQLPGLYADFRSRTPRDAPAGCPRWGWRCLSAAQPSTGRTGEGAGPPGLCADQPCGAAAGGGGAEKQPARACGGDCWGGPMPHGREPESGSAAKVSVCPGEE

SEQ ID NO: 253 - protein, 26 aa, Homo sapiens
MYFIWIGTVFLICCYLFQVSSVVPNT

SEQ ID NO: 254 - protein, 43 aa, Homo sapiens
MGPGFLQCSPTKKGSQTAPLDGSPEDGPAQWVFVEQIRDNKTD

SEQ ID NO: 255 - protein, 55 aa, Homo sapiens
MYMNTCLYLHVYVLTCSGCNVDMCSRLFLSTKLKAHVQIVLYWVFLWSRGNNFLT

SEQ ID NO: 256 - protein, 51 aa, Homo sapiens
MVILDVLELYHMWFLGILYDAIFYCFVHAINADKFFGLKFTKSATVSQNSQ

SEQ ID NO: 257 - protein, 54 aa, Homo sapiens
MYDFLLLLSFIFIVASYWSFLSTIFLDVVCSILHCPVKPQTLLKSCLHVDCKST

SEQ ID NO: 258 - protein, 85 aa, Homo sapiens
MWPGCQVLRAGLSPAGRARFPPDTYLPSPRQGGNPACRCVTAMNAVLQVLPHPAPDTNRADEGCGDQEGSRELPPGGAALGHRGQ

SEQ ID NO: 259 - protein, 64 aa, Homo sapiens
MKPYCMYPFLSGLLSSLLFWLESLMLLCVQMVLFLMLCVLDYRIYCIKIYVSIILLMSIWIISI

SEQ ID NO: 260 - protein, 64 aa, Homo sapiens
MCYFYNTIILTLQGSLMFLLFSVVTLYLFSHSHPTPISIFSDVFNMYPWIYMYSYMVFSVNLYK

SEQ ID NO: 261 - protein, 192 aa, Homo sapiens
MLMYRGEALEDFTGPDCRFVNFKKGDPVYVYYKLARGWPEVWAGSVGRTFGYFPKDLIQVVHEYTKEELQVPTDETDFVCFDGGRDDFHNYNVEELLGFLELYNSAATDSEKAVEQTLQDMEKNPELSNEREPEPEPVEANSEESDSVFSENTEDLQEQFTTSKHHSHGNRQANYASGEQASFESFEEMLQE

SEQ ID NO: 262 - protein, 64 aa, Homo sapiens [sequence omitted]

SEQ ID NO: 263 - protein, 70 aa, Homo sapiens
MKFLLMSLPYRHLFCITQAILSEIAEGIRNDPFKFYLYSVLALFLHYYMYVFVSRFSIYYLKLLRIFKFS

SEQ ID NO: 264 - protein, 74 aa, Homo sapiens
MRQIAVFQRFMFPFLLPWLSCIFSSSQNSIYYVSTFIKCLALKSIIKRQRSEINRGFLAIYHALRNQVTRCGGL

SEQ ID NO: 265 - protein, 70 aa, Homo sapiens
MHSRTRIRLCLCNAKKSCQKYLSSLKLSTLLSPLLFLPFYTPSLKGWGIFVLSFYFMLIIADCNLFKIII

SEQ ID NO: 266 - protein, 52 aa, Homo sapiens [sequence omitted]

SEQ ID NO: 267 - protein, 202 aa, Homo sapiens [sequence omitted]

SEQ ID NO: 268 - protein, 111 aa, Homo sapiens [sequence omitted]

SEQ ID NO: 269 - protein, 127 aa, Homo sapiens
MMKIPHQTQKKRSLEDPNSRPRRPRGEGETWGRVTMTKLAQWLWGLAILGSTWVALTTGALGLELPLSCQEVLWPLPAYLLVSAGCYALGTVGYRVATFHDCEDAARELQSQIQEARADLARRGLRF

SEQ ID NO: 270 - protein, 132 aa, Homo sapiens
MKFRIVTCQSDWRELWVDDAIWRLLFSMILFVIMVLWRPSANNQRFAFSPLSEEEEEDEQKEPMLKESFEGMKMRSTKQEPNGNSKVNKAQEDDLKWVEENVPSSVTDVALPALLDSDEERMITHFERSKME

SEQ ID NO: 271 - protein, 117 aa, Homo sapiens
MKTLFLNTEYLMPFLLNQGGSLLYYLTLASTDLTLAVPICNSLAIIFTLIVGKALGEDIGGKRAVAGMVLTVIGISLCITSSVPWTAELQLHGKGQLQTLSQKCKREASGTQSERFG

SEQ ID NO: 272 - protein, 93 aa, Homo sapiens
MKTLFLNTEYLMPFLLNQCGSLLYYLTLASTDLTLAVPICNSLAIIFTLIVGKALGEDIGGKRAVAGMVLTVIGISLCITSSVSKTQGQQSTL

SEQ ID NO: 273 - protein, 486 aa, Homo sapiens
MRGRGSQQQQPTRRQGQKLPSPSPAGKYESAQPGGTQPEPGLGARMAIHKALVMCLGLPLFLFPGAWAQGHVPPGCSQGLNPLYYNLCDRSGAWGIVLEAVAGAGIVTTFVLTIILVASLPFVQDTKKRSLLGTQVFFLLGTLGLFCLVFACVVKPDFSTCASRRFLFGVLFAICFSCLAAHVFALNFLARKNHGPRGWVIFTVALLLTLVEVIINTEWLIITLVRGSGEGGPQGNSSAGWAVASPCAIANMDFVMALIYVMLLLLGAFLGAWPALCGRYKRWRKHGVFVLLTTATSVAIWVVWIVMYTYGNKQHNSPTWDDPTLAIALAANAWAFVLFYVIPEVSQVTKSSPEQSYQGDMYPTRGVGYETILKEQKGQSMFVENKAFSMDEPVAAKRPVSPYSGYNGQLLTSVYQPTEMALMHKVPSEGAYDIILPRATANSQVMGSANSTLRAEDMYSAQSHQAATPPKDGKNSQVFRNPYVWD

SEQ ID NO: 274 - protein, 118 aa, Homo sapiens [sequence omitted]

SEQ ID NO: 275 - protein, 299 aa, Homo sapiens
MGTKAQVERKLLCLFILAILLCSLALGSVTVHSSEPEVRIPENNPVKLSCAYSGFSSPRVEWKFDQGDTTRLVCYNNKITASYEDRVTFLPTGITFKSVTREDTGTYTCMVSEEGGNSYGEVKVKLIVLVPPSKPTVNIPSSATIGNRAVLTCSEQDGSPPSEYTWFKDGIVMPTNPKSTRAFSNSSYVLNPTTGELVFDPLSASDTGEYSCEARNGYGTPMTSNAVRMEAVERNVGVIVAAVLVTLILLGILVFGIWFAYSRGHFDRTKKGTSSKKVIYSQPSARSEGEFKQTSSFLV

SEQ ID NO: 276 - protein, 259 aa, Homo sapiens [sequence omitted]

SEQ ID NO: 277 - protein, 272 aa, Homo sapiens
MMIHGFQSSHRDFCFGPWKLTASKTHIMKSADVEKLADELHMPSLPEMMFGDNVLRIQHGSGFGIEFNATDALRCVNNYQGMLKVACAEEWQESRTEGEHSKEVIKPYDWTYTTDYKGTLLGESLKLKVVPTTDHIDTEKLKAREQIKFFEEVLLFEDELHDHGVSSLSVKIRVMPSSFFLLLRFFLRIDGVLIRMNDTRLYHEADKTYMLREYTSRESKISSLMHVPPSLFTEPNEISQYLPIKEAVCEKLIFPERIDPNPADSQKSTQVE

SEQ ID NO: 278 - protein, 236 aa, Homo sapiens
MESSCLDIGSVPMGTSCLDSWPVHIISCLDSGSVRIKTSCLDSGPVYMGTSCLDSGPVYMGTSCLGSEPVYMGTSCLGSESVHMGTSCLGSESVHMGTSCLASGPVHMGTSCLGSGPVHMGTSCLGSGSEHMGTSRLDSGPVHVGTSCLGSGSEHVGTSCLGSEYVYTGTSRLDSGPVHMGTSCLDSASEHMGTSSLDSASELVDITCLSKVITPLGFWKNHGDFCPGKRYDAIPL

SEQ ID NO: 279 - protein, 224 aa, Homo sapiens
MESSCLDIGSVHMGTSCLDSWPVHIISCLDSGSVRIKTSCLDSGPVYMGTSCLDSGPVYMGTSCLGSEPVYMGTSCLGSESVYMGTSCLGSESVYMGTSCLASGPVHMGTSCLGSGSEHMGTSRLDSGPVHVGTSCLGSGSEHMGTSCLGSESVYTGTSRLDSGPVHMGTSCLDSASEHMGTSSLDSASELVDITCLSKVITPLGFWKNHGDFCPGKRYDAIPL

SEQ ID NO: 280 - protein, 301 aa, Homo sapiens
MFSHLPFDCVLLLLLLLLTRSSEVEYRAEVGQNAYLPCFYTPAAPGNLVPVCWGKGACPVFECGNVVLRTDERDVNYWTSRYWLNGDFRKGDVSLTIGNVTLADSGIYCCRIQIPGIMNDEKFNLKLVIKPAKVTPAPTLQRDFTAAFPRMLTTRGHGPAETQTLGSLPDINLTQISTLANELRDSRLANDLRDSGATIRIGIYIGAGICAGLALALIFGALIFKWYSHSKEKIQNLSLISLANLPPSGLANAVAEGIRSEENIYTIEENVYEVEEPNEYYCYVSSRQQPSQPLGCRFAMP

SEQ ID NO: 281 - protein, 968 aa, Homo sapiens
MILEQYVVVSNYKKQENSELSLQAGEVVDVIEKNESGWWFVSTSEEQGWVPATYLEAQNGTRDDSDINTSKTGEVSKRRKAHLRRLDRRWTLGGMVNRQHSREEKYVTVQPYTSQSKDEIGFEKGVTVEVIRKNLEGWWYIRYLGKEGWAPASYLKKAKDDLPTRKKNLAGPVEIIGNIMEISNLLNKKASGDKETPPAEGEGHEAPIAKKEISLPILCNASNGSAVGVPDRTVSRLAQGSPAVARIAPQRAQISSPNLRTRPPPRRESSLGFQLPKPPEPPSVEVEYYTIAEFQSCISDGISFRGGQKAEVIDKNSGGWWYVQIGEKEGWAPASYIDKRKKPNLSRRTSTLTRPKVPPPAPPSKPKEAEEGPTGASESQDSPRKLKYEEPEYDIPAFGFDSEPELSEEPVEDRASGERRPAQPHRPSPASSLQRARFKVGESSEDVALEEETIYENEGFRPYAEDTLSARGSSGDSDSPGSSSLSLTRKNSPKSGSPKSSSLLKLKAEKNAQAEMGKNHSSASFSSSITINTTCCSSSSSSSSSLSKTSGDLKPRSASDAGIRGTPKVRAKKDADANAGLTSCPRAKPSVRPKPFLNRAESQSQEKMDISTLRRQLRPTGQLRGGLKGSKSEDSELPPQTASEAPSEGSRRSSSDLITLPATTPPCPTKKEWEGPATSYMTCSAYQKVQDSEISFPAGVEVQVLEKQESGWWYVRFGELEGWAPSHYLVLDENEQPDPSGKELDTVPAKGRQNEGKSDSLEKIERRVQALNTVNQSKKATPPIPSKPPGGFGKTSGTPAVKMRNGVRQVAVRPQSVFVSPPPKDNNLSCALRRNESLTATDGLRGVRRNSSFSTARSAAAEAKGRLAERAASQGSDSPLLPAQRNSIPVSPVRPKPIEKSQFIHNNLKDVYVSIADYEGDEETAGFQEGVSMEVLERNPNGWWYCQILDGVKPFKGWVPSNYLEKKN

SEQ ID NO: 282 - protein, 112 aa, Homo sapiens
MCHWQNSFLCQSFLTFGSILALLAGKACYPESESIRELFMWSLELYSLPFYLFFKLSPLNLPGKLGLIETLSTCLGQKLDPVLETLQRVRSMASLIANFFVPFIQKKGQLIT

SEQ ID NO: 283 - protein, 231 aa, Homo sapiens [sequence omitted]

SEQ ID NO: 284 - protein, 474 aa, Homo sapiens
MGSTAILALLLAVLQGVCAEVQLVQSGAEVKKPGESVKISCKGSGYSFSDYWVAWVRQSPDKGLAWMGIIYPGDSDTRYSPSFQGQVTISADKSISTAYLQWSSLKDSDTAMYYCARGARGTAPSYHYYGLDVWGRGTSVTVSSASTKGPSVFPLAPSSKSTSGGTAALGCLVKDYFPEPVTVSWNSGALTSGVHTFPAVLQSSGLYSLSSVVTVPSSSLGTQTYICNVNHKPSNTKVDKRVEPKSCDKTHTCPPCPAPELLGGPSVFLFPPKPKDTLMISRTPEVTCVVVDVSHEDPEVKFNWYVDGVEVHNAKTKPREEQYNSTYRVVSVLTVLHQDWLNGKEYKCKVSNKALPAPIEKTISKAKGQPREPQVYTLPPSREEMTKNQVSLTCLVKGFYPSDIAVEWESNGQPENNYKTTPPVLDSDGSFFLYSKLTVDKSRWQQGNVFSCSVMHEALHNHYTQKSLSLSPGK

SEQ ID NO: 285 - protein, 47 aa, Homo sapiens
MLGICLCSICVLRLCLEKSKIFPPPRTSDHSLEGSVTPVENAARSGM

SEQ ID NO: 286 - protein, 183 aa, Homo sapiens
MNSNLPAENLSIAVNMTKTLPTAVTHGFNSTNDPPSMSITRLFSALLECFGIVLCGYIAGRANVITSTQAKGLGNFVSRFALPALLFKNMVVLNFSNVDWAFLYSILIAKASVFFIVCVLTLLVASPDSRFSKAGLFPIFATQSNDFALGYPIGKLIFIFQVFKKFNFNLFRHLLVTDSYSHI

SEQ ID NO: 287 - protein, 106 aa, Homo sapiens
MFLRGIPSRRESLKTNTHRSWRWAPHSPLDLTIRNLLCHLFIKLSQAQKACPNHMLRAKQMEQKLPQAAGSHYGWDEARTWAHTGCKAADAWVDPGVPEQDLPAFN

SEQ ID NO: 288 - protein, 114 aa, Homo sapiens
MSSWFLRAGHGLIWVLFFRIGQAAVGVSAGPGGSPKAHLGRVASQHPHGAESRACLLARGLPKALSSMLAVDCRPRSGPLHRAAHIMAASLISKPVRGCLSEDDIPSPLSDSAY

SEQ ID NO: 289 - protein, 51 aa, Homo sapiens
MGWDSKLLFLFTCLSCVTTCSVSTCFQAPLGSSSFAPSGFMDAWYSCYVLA

SEQ ID NO: 290 - protein, 107 aa, Homo sapiens [sequence omitted]

SEQ ID NO: 291 - protein, 95 aa, Homo sapiens
MLLWVFLQLNYKIQAIPTYETVMTFFKSFPENCCFLDRDIGQSLRPLFLCLRLHGITKGKDLRCCGTLTSSQSHGSTRLQSTITTHWRMGATWST

SEQ ID NO: 292 - protein, 366 aa, Homo sapiens
MLYWVVIHFGARGPGGRRKRRTTNGEGRNAARHAGKEGNPRKPTGNAQTPMDPRKRKKGSLTPGPNRRQQESEGARRQSRRGENGSEAAQSPSRGTERKATKRVKRKQDVTGNDPHSPSLSSGGPIHKANTSGRLKVSDRGTAERRGGFLARWRVFTVCWVQACVCPGKMLAMGALAGFWILCLLTYGYLSWGQALEEEEEGALLAQAGEKLEPSTTSTSQPHLIFILADDQGFRDVGYHGSEIKTPTLDKLAAEGVKLENYYVQPICTPSRSQFITGKYQIHTGLQHSIIRPTQPNCLPLDNATLPQKLKEVGYSTHMVGKWHLGFYRKECMPTRRGFDTFFGSLLGSGDYYTHYKWDSPWDVWL

SEQ ID NO: 293 - protein, 113 aa, Homo sapiens [sequence omitted]

SEQ ID NO: 294 - protein, 46 aa, Homo sapiens
MDLYVVIFWLVYIFSTYIITYIKGNVGLCFQILFQLSFERRPKSVR

SEQ ID NO: 295 - protein, 117 aa, Homo sapiens
MSFPIHLRFFSLFFLHWLLLSGFSSLLPWASAFVQYSRCPEHTPSLCPGGANNPLLQAPTQMLPPLGCLLCALPASPSPYLCWHLLYHAFRNLLIPLISGAPCGSGIPKFSKCLSVS

SEQ ID NO: 296 - protein, 38 aa, Homo sapiens
MADTAENSRYNVHIPHRWTINKFFILMQSSLSYSCLYY

SEQ ID NO: 297 - protein, 56 aa, Homo sapiens
MLGWQIWRLRPQLLSFHTQDRCHWSITSQCSKPESQESFLSTIHLLEGAQEGTPTE

SEQ ID NO: 298 - protein, 72 aa, Homo sapiens
MIYVFSLAHSLLIFKMRETGILLCFLSALNYITLVTSQKLILSKKMHVNHYLPKKTISKFLYFVKVFHDLVL

SEQ ID NO: 299 - protein, 59 aa, Homo sapiens [sequence omitted]

SEQ ID NO: 300 - protein, 107 aa, Homo sapiens
MSYSTPAWHEGCRYENTEYGCFLLSTHITEICKNVTMLLFSLNFFFWKIVMFHKNVIFILTCNGFIIVTFKWIDKFILNISILISNTVNVNSHNPHKQKFFGDLSNF

SEQ ID NO: 301 - protein, 227 aa, Homo sapiens
MLVVKGVCFKAHKNVLAAFSQYFRNVQQMHSRTKRWMNRIRMLHHQLIVITPQVKSQNKLLILQMAAAQNCLSNSQITITNSETFTPVNDSAPHPESDATCQQPVKQMRLKKAIHLKKLNFLKSQKYAEQVSEPKSDDGLTKRLESASKNTLEKASSQSAEEKESEEVVSCENFNCISETERPEDPAALEDQSQTLQSQRQYACELCGKPFKHPSNLELHKRSHTGN

SEQ ID NO: 302 - protein, 429 aa, Homo sapiens
MCPGALWVALPLLSLLAGSLQGKPLQSWGRGSAGGNAHSPLGVPGGGLPEHTFNLKMFLENVKVDFLRSLNLSGVPSQDKTRVEPPQYMIDLYNRYTSDKSTTPASNIVRSFSMEDAISITATEDFPFQKHILLFNISIPRHEQITRAELRLYVSCQNHVDPSHDLKGSVVIYDVLDGTDAWDSATETKTFLVSQDIQDEGWETLEVSSAVKRWVRSDSTKSKNKLEVTVESHRKGCDTLDISVPPGSRNLPFFVVFSNDHSSGTKETRLELREMISHEQESVLKKLSKDGSTEAGESSHEEDTDGHVAAGSTLARRKRSAGAGSHCQKTSLRVNFEDIGWDSWIIAPKEYEAYECKGGCFFPLADDVTPTKHAIVQTLVHLKFPTKVGKACCVPTKLSPISVLYKDDMGVPTLKYHYEGMSVAECGCR

SEQ ID NO: 303 - protein, 55 aa, Homo sapiens
MFGMIKRRVRRAVFVGRTVLCGSCNSGIIMHRGKTPPLKMVCRFEESFSCLFLNS

SEQ ID NO: 304 - protein, 48 aa, Homo sapiens
MGFLFLLDSALMQTWVTVIDVSLHHVEIKAPRIRLMWSLPLRRQKYTM

SEQ ID NO: 305 - protein, 106 aa, Homo sapiens
MLATLACMAIPWTHLGCSCLLACLPFSHHLGLSEDIISSEKPSVTMLSKILQHFSHPLSHYSAFSETLVLPETYLFTCLVSFLPHYHVSFLRVRDLVRDNHCILRV

SEQ ID NO: 306 - protein, 46 aa, Homo sapiens
MHTPHLPNIIVYFILLYICSQYLYLLTIRHNHLTQSLFYNKLLSVL

SEQ ID NO: 307 - protein, 69 aa, Homo sapiens
MPVTPDPSAVSLFVTPWPLLLCLPWPHRVPGQSHPGLHSRAPVHRLKPGPPARLQLPAAHRNLRHLSIF

SEQ ID NO: 308 - protein, 69 aa, Homo sapiens
MSWYTCQCLFFLSNTLRNGATSCHWYCSPDDMQMVDFSSTYERIFRPFVFKIKGPDSFRIDMSPIPEDI

SEQ ID NO: 309 - protein, 149 aa, Homo sapiens
MVFLTAQLWLRNRVTDRYFRIQEVLKHARHFRGRKNRCYRLAVRTVIRAFVKCTKARYLKKKNMRTLWINRITAASQEHGLKYPALIGNLVKCQVELNRKVLADLAIYEPKTFKSLAALASRRRHEGFAAALGDGKEPEGIFSRVVQYH

SEQ ID NO: 310 - protein, 277 aa, Homo sapiens
MAGPELLLDSNIRLWVVLPIVIITFFVGMIRHYVSILLQSDKKLTQEQVSDSQVLIRSRVLRENGKYIPKQSFLTRKYYFNNPEDGFFKKTKRKVVPPSPMTDPTMLTDMMKGNVTNVLPMILIGGWINMTFSGFVTTKVPFPLTLRFKPMLQQGIELLTLDASWVSSASWYFLNVFGLRSIYSLILGQDNAADQSRMMQEQMTGAAMAMPADTNKAFKTEWEALELTDHQWALDDVEEELMGQRPPLRRHVQKGITDLYFLKTEQGLAVSGTWSCT

SEQ ID NO: 311 - protein, 51 aa, Homo sapiens [sequence omitted]

SEQ ID NO: 312 - protein, 64 aa, Homo sapiens
MVTYFIKCFHYEVSFLLWFAVVRNDVDRPVSLSLFSSYSLFSTYPDTCPLFKLPTHLLCCLEEI

SEQ ID NO: 313 - protein, 46 aa, Homo sapiens
MEDVREKVMAVPIMLFYFSLLYNSLLFLNPILLLSTTHLLLGDKAV

SEQ ID NO: 314 - protein, 100 aa, Homo sapiens [sequence omitted]

SEQ ID NO: 315 - protein, 304 aa, Homo sapiens
MCGRFLRRLLAEESRRSTPVGRLLLPVLLGFRLVLLAASGPGVYGDEQSEFVCHTQQPGCKAACFDAFHPLSPLRFWVFQVILVAVPSALYMGFTLYHVIWHWELSGKGKEEETLIQGREGNTDVPGAGSLRLLWAYVAQLGARLVLEGAALGLQYHLYGFQMPSSFACRREPCLGSITCNLSRPSEKTIFLKTMFGVSGFCLLFTFLELVLLGLGRWWRTWKHKSSSSKYFLTSESTRRHKKATDSLPVVETKEQFQEADGKLPVPNKSGCLQMSLPLQLRNFFLASDWLLSAKHELAKGKLL

SEQ ID NO: 316 - protein, 389 aa, Homo sapiens [sequence omitted]

SEQ ID NO: 317 - protein, 58 aa, Homo sapiens
MSLKRIILRKDLRFKKSITLHEQFHVFKFYKKTQTSSVIVEGRRRGRYYKGTCENFLE

SEQ ID NO: 318 - protein, 76 aa, Homo sapiens
MFKVVFCFGLVWFCFQRAHKPIRFEKHNFTINEGNLFSMNIPIVTIRSHHRTSCYHKLITCEQQTVFTNIKRHSKL

SEQ ID NO: 319 - protein, 53 aa, Homo sapiens
MNLYLFAVLFFYVFLHIKIIFICFATKWHNLFSKFSYFCILHVKALSLNLGSG

SEQ ID NO: 320 - protein, 63 aa, Homo sapiens [sequence omitted]

SEQ ID NO: 321 - protein, 62 aa, Homo sapiens
MCTLFMHLLFCHLQSIQLKQELRLNYLTLTQFWQRCYSEMIFFCLSKVFLHVFQDGLEHHLE

SEQ ID NO: 322 - protein, 306 aa, Homo sapiens
MLQVKYLLNQGIVLPQIVTGVAANLVNALANYLFLHQLHLGVIGSALANLISQYTLALLLFLYILGKKLHQATWGGWSLECLQDCASFLRLAIPSMLMLCMEWWAYEVGSFLSGILGMVELGAQSIVYELAIIVYMVPAGFSVAASVRVGNALGAGDMEQARKSSTVSLLITVLFAVAFSVLLLSCKDHVGYIFTTDRDIINLVAQVVPIYAVSHLFEALACTSGGVLRGSGNQKVGAIVNTIGYYVAGLPIGIALMFATTLGVMGLWSGIIICTVFQAVCFLGFIIQLNWKKACQQGALKTLKEF

SEQ ID NO: 323 - protein, 106 aa, Homo sapiens
MHLTLSLLLFSLHFPTYIIRVNFCLVSNLFQRMRSTKLLRLIDLDFSFTFSLLDLPPVNEYDMYIRNFGKKKKRGGRFKGSRFTNAGWQRKSFFMGPPKSIPGAGV

SEQ ID NO: 324 - protein, 407 aa, Homo sapiens
MTVRGDVLAPDPASPTTAAASPSVSVIPEGSPTAMEQPVFLMTTAAQAISGFFVWTALLITCHQIYMHLRCYSCPNEQRYIVRILFIVPIYAFDSWLSLLFFTNDQYYVYFGTVRDCYEALVIYNFLSLCYEYLGGESSIMSEIRGKPIESSCMYGTCCLWGKTYSIGFLRFCKQATLQFCVVKPLMAVSTVVLQAFGKYRDGDFDVTSGYLYVTIIYNISVSLALYALFLFYFATRELLSPYSPVLKFFMVKSVIFLSFWQGMLLAILEKCGAIPKIHSARVSVGEGTVAAGYQDFIICVEMFFAALALRHAFTYKVYADKRLDAQGRCAPMKSISSSLKETMNPHDIVQDAIHNFSPAYQQYTQQSTLEPGPTWRGGAHGLSRSHSLSGARDNEKTLLLSSDDEF

SEQ ID NO: 325 - protein, 63 aa, Homo sapiens
MGKKVTLLLQKCAWLLLVCCLFTGIKYLNKCFITDRELLRDVHNALNILRHNFYVNWASLNTF

SEQ ID NO: 326 - protein, 96 aa, Homo sapiens
MPSVVLNMVQLFIPILKFQLGYSVLSLCNHVLEFLFPSSLSGIFSSSLPLLLPFPLSLPSLPPSLFPSLRVLLCHPHWSVASNSWAVAILLPQPPE

SEQ ID NO: 327 - protein, 102 aa, Homo sapiens [sequence omitted]

SEQ ID NO: 328 - protein, 61 aa, Homo sapiens
MKKGVGCTCVSVCPCMCVHPYVCTCACMHVCVCLCAWCLSQPGGLGGFSEEVTSLPRPRAL

SEQ ID NO: 329 - protein, 118 aa, Homo sapiens [sequence omitted]

SEQ ID NO: 330 - protein, 111 aa, Homo sapiens
MQLHGKGSQDPSTKGHIKALQTVTSFLLLCAIYFLSMIISVCNFGRLEKQPVFMFCQAIIFSYPSTHPFILILGNKKLKQIFLSVLRHVRYWVKDRSLRLHRFTRGALCVF

SEQ ID NO: 331 - protein, 318 aa, Homo sapiens
MAPWAEAEHSALNPLRAVWLTLTAAFLLTLLLQLLPPGLLPGCAIFQDLIRYGKTKCGEPSRPAACRAFDVPKRYFSHFYIISVLWNGFLLWCLTQSLFLGAPFPSWLHGLLRILGAAQFQGGELALSAFLVLVFLWLHSLRRLFECLYVSVFSNVMIHVVQYCFGLVYYVLVGLTVLSQVPMDGRNAYITGKNLLMQARWFHILGMMMFIWSSAHQYKCHVILGNLRKNKAGVVIHCNHRIPFGDWFEYVSSPNYLAELMIYVSMAVTFGFHNLTWWLVVTNVFFNQALSAFLSHQFYKSKFVSYPKHRKAFLPFLF

SEQ ID NO: 332 - protein, 307 aa, Homo sapiens
MEFGLSWLFLVAILKGVQCEVQLLESGGGLVQPGGSLRLSCAASGFTFSSFSMSWVRQAPGKGLEWVSSISGSSGTTYYADSVKGRFTISRDNSKNTLYLQMNSLRAEDTAVYYCAKPFPYFDYWGQGTLVTVSSGDGSSGGSGGASTGEIVLTQSPGTLSLSPGERATLSCRASQSVSSSYLAWYQQKPGQAPRLLIYGASSRATGIPDRFSGSGSGTDFTLTISRLEPEDFAVYYCQQTGRIPPTFGQGTKVEIKRTVAAPSVFIFPPSDEQLKSGTASVVCLLNNFYPREAKVQWKVDNALPIG

SEQ ID NO: 333 - protein, 159 aa, Homo sapiens
MEFGLSWLFLVAILKGVQCEVQLLESGGGLVQPGGSLRLSCAASGFTFDSYAMSWVRQAPGKGLDWVSAVSGGGGSTYYADSVKGRFTISRDNAKSTMYLQMNSLRAEDTAMYYCAKDNYDFWSGTFDYWGQGTLVTVSSASTKGPSVVAGARRLAKLC

SEQ ID NO: 334 - protein, 312 aa, Homo sapiens
MEFGLSWLFLVAILKGVQCEVQLLESGGGLVQPGGSLRLSCAATGFTFSSYAMSWVRQAPGKGLEWVSEIISSGGTTYYADSVKGRFTISRDNSKNTLYLQMNGMRAEDTAIYYCAKDIISDSWRYFDYWGQGALVTVSSGDGSSGGSGGASTGEIVLTQSPGTLSLSPGERATLSCRASQSVSSSYLAWYQQKPGQAPRLLIYGASSRATGIPDRFSGSGSGTDFTLTISRLEPEDFAVYYCQQTGRIPPTFGQGTKVEIKRTVAAPSVFIFPPSDEQLKSGTASVVCLLNNFYPREAKVQWKVDNALPIG

SEQ ID NO: 335 - protein, 363 aa, Homo sapiens
MEFGLSWLFLVAILKGVQCEVQLLESGGGLVQPGGSLRLSCAASGFTFSSFSMSWVRQAPGKGLEWVSSISGSSGTTYYADSVKGRFTISRDNSKNTLYLQMNSLRAEDTAVYYCAKPFPYFDYWGQGTLVTVSSGDGSSGGSVTVSSSDIQMTQSPSTLSASVGDRVTITCRASQSISSWLAWYQQKPGKAPKLLIYKASSLESGVPSRFSGSGSGTDFTLTISSLQPDDFATYYCQQYVYYPLTFGGGTKVEIKRTVAAPSVFIFPPSDEQLKSGTASVVCLLNNFYPREAKVQWKVDNALQSGNSQESVTEQDSKDSTYSLSSTLTLSKADYEKHKLYACEVTHQGLSSPVTKSFNRGEC

SEQ ID NO: 336 - protein, 46 aa, Homo sapiens
MFPPYFSLILLLFTFASKFFLSLNLKKSNIVKARIESTKTVISKRC

SEQ ID NO: 337 - protein, 78 aa, Homo sapiens
MAMQSVIRKQFTALAGFCFWFCLFTLAVLSLTLLICKLRIMPFKLEGLFQELNKSWHMKLLSQDRELINMLLLLMGRS

SEQ ID NO: 338 - protein, 1188 aa, Homo sapiens [sequence omitted]

SEQ ID NO: 339 - protein, 52 aa, Homo sapiens
MALNIIINPVWFCHCLTCTIHIDFHILFIKIFKHMFFRSLWSSWLSHQLDHI

SEQ ID NO: 340 - protein, 77 aa, Homo sapiens
MAIFPLWKLLNVLVCIFSSFIMLNIYCTLLIWKFIYSAFFCYITSLMIFPFSFFCSFFLDLLKVIVYIFFLYLYSSR

SEQ ID NO: 341 - protein, 48 aa, Homo sapiens
MGYLLWLVLSILVCTELGLGRLTFPLDSESPRTSYKVRPWVVLEAWVW

SEQ ID NO: 342 - protein, 137 aa, Homo sapiens
MSGSGMELLMDTGKEDEVIVWAQMCLSHLVSLFPAATAFLINKVPLPVDKLAPLPLDNILPFMDPLKLLLKTLGISVEHLVEGLRKCVNELRPEASEAVKKLLVTTAWEANLPKGRHTHPECLAPLLVPCKCAFPLY

SEQ ID NO: 343 - protein, 232 aa, Homo sapiens
MAWIPLFLGVLAYCTGSVASYELTQPPSVSVSPGQTASITCSGDKLGDKYACWYQQKPGQSPVLVIYQDSKRPSGIPERFSGSNSGNTATLTISGTQAMDEADYYCQAWDSSTLYVFGTGTKVTVLGQPKANPTVTLFPPSSEELQANKATLVCLISDFYPGAVTVAWKADGSPVKAGVETTKPSKQSNNKYAASSYLSLTPEQWKSHRSYSCQVTHEGSTVEKTVAPTECS

SEQ ID NO: 344 - protein, 269 aa, Homo sapiens
MLQTLNEEPVTPEPEVEPPSAPELKQGLYELSASNFELHVAQGDHFIKFFAPWCGHCKALAPTWEQLALGLEHSETVKIGKVDCTQHYELCSGNQVRGYPTLLWFRDGKKVDQYKGKRDLESLREYVESQLQRTETGATETVTPSEAPVLAAEPEADKGTVLALTENNFDDTIAEGITFIKFYAPWCGHCKTLAPTWEELSKKEFPGLAGVKIAEVDCTAERNICSKYSVRGYPTLLLFRGGKKVSEHSGGRDLDSLHRFVLSQAKDEL

SEQ ID NO: 345 - protein, 311 aa, Homo sapiens
MLLLLLLLGPGSGLGAVVSQHPSRVICKSGTSVKIECRSLDFQATTMFWYRQFPKQSLMLMATSNEGSKATYEQGVEKDKFLINHASLTLSTLTVTSAHPEDSSFYICSARESTSDPKNEQFFGPGTRLTVTEDLKNVFPPEVAVFEPSEAEISHTQKATLVCLATGFYPDHVELSWWVNGKEVHSGVSTDPQPLKEQPALNDSRYCLSSRLRVSATFWQNPRNHFRCQVQFYGLSENDEWTQDRAKPVTQIVSAEAWGRADCGFTSESYQQGVLSATILYEILLGKATLYAVLVSALVLMAMVKRKDSRG

SEQ ID NO: 346 - protein, 551 aa, Homo sapiens
MLPLLLLPLLWGGSLQEKPVYELQVQKSVTVQEGLCVLVPCSFSYPWRSWYSSPPLYVYWFRDGEIPYYAEVVATNNPDRRVKPETQGRFRLLGDVQKKNCSLSIGDARMEDTGSYFFRVERGRDVKYSYQQNKLNLEVTALIEKPDIHFLEPLESGRPTRLSCSLPGSCEAGPPLTFSWTGNALSPLDPETTRSSELTLTPRPEDHGTNLTCQMKRQGAQVTTERTVQLNVSYAPQTITIFRNGIALEILQNTSYLPVLEGQALRLLCDAPSNPPAHLSWFQGSPALNATPISNTGILELRRVRSAEEGGFTCRAQHPLGSLQIFLNLSVYSLPQLLGPSCSWEAEGLHCRCSFRARPAPSLCWRLEEKPLEGNSSQGSFKVNSSSAGPWANSSLILHGGLSSDLKVSCKAWNIYGSQSGSVLLLQGRSNLGTGVVPAALGGAGVMALLCICLCLIFFLIVKARRKQAAGRPEKMDDEDPIMGTITSGSRKKPWPDSPGDQASPPGDAPPLEEQKELHYASLSFSEMKSREPKDQEAPSTTEYSEIKTSK

SEQ ID NO: 347 - protein, 1061 aa, Homo sapiens
MLGSDDFFYVGGSPSTADLPGSPVSNNFMGCLKEVVYKNNDIRLELSRLARIADTKMKIYGEVVFKCENVATLDPINFETPEAYISLPKWNTKRMGSISFDFRTTEPNGLILFTHGKPQERKDARSQKNTKVDFFAVELLDGNLYLLLDMGSGTIKVKATQKKANDGEWYHVDIQRDGRSGTISVNSRRTPFTASGESEILDLEGDMYLGGLPENRAGLILPTELWTAMLNYGYVGCIRDLFIDGRSKNIRQLAEMQNAAGVKSSCSRMSAKQCDSYPCKNNAVCKDGWNRFICDCTGTGYWGRTCEREASILSYDGSMYMKIIMPMVMHTEAEDVSFRFMSQRAYGLLVATTSRDSADTLRLELDGGRVKLMVNLDCIRINCNSSKGPETLYAGQKLNDNEWHTVRVVRRGKSLKLTVDDDVAEGTMVGDHTRLEFHNIETGIMTEKRYISVVPSSFIGHLQSLMFNGLLYIDLCKNGDIDYCELKARFGLRNIIADPVTFKTKSSYLSLATLQAYTSMHLFFQFKTTSPDGFILFNSGDGNDFIAVELVKGYIHYVFDLGNGPNVIKGNSDRPLNDNQWHNVVITRDNSNTHSLKVDTKVVTQVINGAKNLDLKGDLYMAGLAQGMYSNLPKLVASRDGFQGCLASGDLNGRLPDLINDALHRSGQIERGCEGPSTTCQEDSCANQGVCMQQWEGFTCDCSMTSYSGNQCNDPGATYIFGKSGGLILYTWPANDRPSTRSDRLAVGFSTTVKDGILVRIDSAPGLGDFLQLHIEQGKIGVVFNIGTVDISIKEERTPVNDGKYHVVRFTRNGGNATLQVDNWPVNEHYPTGRQLTIFNTQAQIAIGGKDKGRLFQGQLSGLYYDGLKVLNMAAENNPNIKINGSVRLVGEVPSILGTTQTTSMPPEMSTTVMETTTTMATTTTRKNRSTASIQPTSDDLVSSAECSSDDEDFVECEPSTANPTEPGIRRVPGASEVIRESSSTTGMVVGIVAAAALCILILLYAMYKYRNRDEGSYQVDETRNYISNSAQSNGTLMKEKQQSSKSGHKKQKNKDREYYV

SEQ ID NO: 348 - protein, 1091 aa, Homo sapiens
MLGSDDFFYVGGSPSTADLPGSPVSNNFMGCLKEVVYKNNDIRLELSRLARIADTKMKIYGEVVFKCENVATLDPINFETPEAYISLPKWNTKRMGSISFDFRTTEPNGLILFTHGKPQERKDARSQKNTKVDFFAVELLDGNLYLLLDMGSGTIKVKATQKKANDGEWYHVDIQRDGRSGTISVNSRRTPFTASGESEILDLEGDMYLGGLPENRAGLILPTELWTAMLNYGYVGCIRDLFIDGRSKNIRQLAEMQNAAGVKSSCSRMSAKQCDSYPCKNNAVCKDGWNRFICDCTGTGYWGRTCEREASILSYDGSMYMKIIMPMVMHTEAEDVSFRFMSQRAYGLLVATTSRDSADTLRLELDGGRVKLMVNLDCIRINCNSSKGPETLYAGQKLNDNEWHTVRVVRRGKSLKLTVDDDVAEGTMVGDHTRLEFHNIETGIMTEKRYISVVPSSFIGHLQSLMFNGLLYIDLCKNGDIDYCELKARFGLRNIIADPVTFKTKSSYLSLATLQAYTSMHLFFQFKTTSPDGFILFNSGDGNDFIAVELVKGYIHYVFDLGNGPNVIKGNSDRPLNDNQWHNVVITRDNSNTHSLKVDTKVVTQVINGAKNLDLKGDLYMAGLAQGMYSNLPKLVASRDGFQGCLASGDLNGRLPDLINDALHRSGQIERGCEGPSTTCQEDSCANQGVCMQQWEGFTCDCSMTSYSGNQCNDPGATYIFGKSGGLILYTWPANDRPSTRSDRLAVGFSTTVKDGILVRIDSAPGLGDFLQLHIEQGKIGVVFNIGTVDISIKEERTPVNDGKYHVVRFTRNGGNATLQVDNWPVNEHYPTGNTDNERFQMVKQKIPFKYNRPVEEWLQEKGRQLTIFNTQAQIAIGGKDKGRLFQGQLSGLYYDGLKVLNMAAENNPNIKINGSVRLVGEVPSILGTTQTTSMPPEMSTTVMETTTTMATTTTRKNRSTASIQPTSDDLVSSAECSSDDEDFVECEPSTANPTEPGIRRVPGASEVIRESSSTTGMVVGIVAAAALCILILLYAMYKYRNRDEGSYQVDETRNYISNSAQSNGTLMKEKQQSSKSGHKKQKNKDREYYV

SEQ ID NO: 349 - protein, 47 aa, Homo sapiens
MGSLMPLRPLALHTALGAALNFSLPCEWSTLPSASEAGRLWGPPSFQ

SEQ ID NO: 350 - protein, 458 aa, Homo sapiens
MAWASRLGLLLALLLPVVGASTPGTVVRLNKAALSYVSEIGKAPLQRALQVTVPHFLDWSGEALQPTRIRILNVHVPRLHLKFIAGFGVRLLAAANFTFKVFRAPEPLELTLPVELLADTRVTQSSIRTPVVSISACSLFSGHANEFDGSNSTSHALLVLVQKHIKAVLSNKLCLSISNLVQGVNVHLGTLIGLNPVGPESQIRYSMVSVPTVTSDYISLEVNAVLFLLGKPIILPTDATPFVLPRHVGTEGSMATVGLSQQLFDSALLLLQKAGALNLDITGQLRSDDNLLNTSALGRLIPEVARQFPEPMPVVLKVRLGATPVAMLHTNNATLRLQPFVEVLATASNSAFQSLFSLDVVVNLRLQLSVSKVKLQGTTSVLGDVQLTVASSNVGFIDTDQVRTLMGTVFEKPLLDHLNALLAMGIALPGVVNLHYVAPEIFVYEGYVVISSGLFYQS

SEQ ID NO: 351 - protein, 66 aa, Homo sapiens
MKLVLLRKTSLSVFTTLFSVSSSQYPVLSTSICNTPVFSTLFLVSCSVNPLPSTVFLVLLYSVACL

SEQ ID NO: 352 - protein, 173 aa, Homo sapiens
MASRKTKKKEGGALRAQRASSNVFSNFEQTQIQEFKEAFTLMDQNRDGFIDKEDLKDTYASLGKTNVKDDELDAMLKEASGPINFTMFLNLFGEKLSGTDAEETILNAFKMLDPDGKGKINKEYIKRLLMSQADKMTAEEVDQMFQFASIDVAGNLDYKALSYVITHGEEKEE

SEQ ID NO: 353 - protein, 63 aa, Homo sapiens [sequence omitted]

SEQ ID NO: 354 - protein, 320 aa, Homo sapiens
MAAATGAVAASAASGQAEGKKITDLRVIDLKSELKRRNLDITGVKTVLISRLKQAIEEEGGDPDNIELTVSTDTPNKKPTKGKGKKHEADELSGDASVEDDAFIKDCELENQEAHEQDGNDELKDSEEFGENEEENVHSKELLSAEENKRAHELIEAEGIEDIEKEDIESQEIEAQEGEDDTFLTAQDGEEEENEKEGSLAEADHTAHEEMEAHTTVKEAEDDNISVTIQAEDAITLDFDGDDLLETGKNVKITDCEASKPKDGQGAIAQRPDKESKDYEMNASHKDGKKEDCVKGDPVEKEARESSKKAESGDQRKGLL

SEQ ID NO: 355 - protein, 58 aa, Homo sapiens
MLIVSGYLCFCALQWTELGNVCVCAHICRCTHMQVSGITSPVHVHIHRVLSCLIHFTS

SEQ ID NO: 356 - protein, 71 aa, Homo sapiens
MHLLVSHAFLPFPLHGYSGRQRGAKQWRCHPARASRERPSEDNLSPAVKEESGFVVSEHLAALHRKLRGCH

SEQ ID NO: 357 - protein, 310 aa, Homo sapiens
MLLLLLLLGPAGSGLGAVVSQHPSRVICKSGTSVKIECRSLDFQATTMFWYRQFPKQSLMLMATSNEGSKATYEQGVEKDKFLINHASLTLSTLTVTSAHPEDSSFYICSASGMRRTDTQYFGPGTRLTVLEDLKNVFPPEVAVFEPSEAEISHTQKATLVCLATGFYPDHVELSWWVNGKEVHSGVSTDPQPLKEQPALNDSRYCLSSRLRVSATFWQNPRNHFRCQVQFYGLSENDEWTQDRAKPVTQIVSAEAWGRADCGFTSESYQQGVLSATILYEILLGKATLYAVLVSALVLMAMVKRKDSRG

SEQ ID NO: 358 - protein, 52 aa, Homo sapiens
MSVGLHLGFLAWFLPFLIPTSPLPLLFQLGALPNESLALYAWLRDCFWENIT

SEQ ID NO: 359 - protein, 66 aa, Homo sapiens
MSSPCFQCFHLCCTIKVWPLCHHLQKAFPDFSIHVFSERDLSSFCEVQLLKICLQKYFLGSLMHCS

SEQ ID NO: 360 - protein, 71 aa, Homo sapiens
MEKYFHTVMIKLCHQLYNVYVCFFHLIVLGDIAIDYIIVPNISYLSISIPFVVTNIRGRDIFHPCNVALVM

SEQ ID NO: 361 - protein, 49 aa, Homo sapiens
MFVMFYENKRREYLQDMLLSYRLLVAILVLLKKLTELNTITLICKSIIF

SEQ ID NO: 362 - protein, 51 aa, Homo sapiens
MNIVFVILLFKDMQVLEVFVLLNVLTTLTIIAAGILCTSFCCKPFIYINPL

SEQ ID NO: 363 - protein, 60 aa, Homo sapiens
MIRFALPWFSQIWLSKQTWTRLTHLAFLLQECNSMFYPKVSRTTVFGCLFNPLSSRVCFE

SEQ ID NO: 364 - protein, 88 aa, Homo sapiens
MTNFFHLLLPLLPSLFSPSSKTHSFNIHKIIIIILFFNSIFLYPRDYLKIRNWLQSNTLEREIEWITSIRCLCNSGTTFIFPLTTKST

SEQ ID NO: 365 - protein, 432 aa, Homo sapiens
MLENYGNLVSVGCQLSKPGVISQLEKGEEPWLMERDISGVPSSDLKSKTKTKESALQNDISWEELHCGLMMERFTKGSSMYSTLGRISKCNKLESQQENQRMGKGQIPLMCKKTFTQERGQESNRFEKRINVKSEVMPGPIGLPRKRDRKYDTPGKRSRYNIDLVNHSRSYTKMKTFECNICEKIFKQLIHLTEHMRIHTGEKPFRCKECGKAFSQSSSLIPHQRIHTGEKPYECKECGKTFRHPSSLTQHVRIHTGEKPYECRVCEKAFSQSIGLIQHLRTHVREKPFTCKDCGKAFFQIRHLRQHEIIHTGVKPYICNVCSKTFSHSTYLTQHQRTHTGERPYKCKECGKAFSQRIHLSIHQRVHTGVKPYECSHCGKAFRHDSSFAKHQRIHTGEKPYDCNECGKAFSCSSSLIRHCKTHLRNTFSNVV

SEQ ID NO: 366 - protein, 56 aa, Homo sapiens
MPCSVPETLFSLLWLAPSHHSGFSSNEASLRTDLLFATAILYSLWHPPYYFLYNTS

SEQ ID NO: 367 - protein, 55 aa, Homo sapiens [sequence omitted]

SEQ ID NO: 368 - protein, 48 aa, Homo sapiens
MILNLSSLTLVFAWNYPLHLMISLNVSCSCYSDDISGIYRSVLRQKLG

SEQ ID NO: 369 - protein, 71 aa, Homo sapiens
MCLILVIWKIHYAELIMLNKRVVNKCRSCLIQKCLSTCHSTVIVLYQCREEEAVMLIKLNFKMKIQRTICI

SEQ ID NO: 370 - protein, 82 aa, Homo sapiens [sequence omitted]

SEQ ID NO: 371 - protein, 90 aa, Homo sapiens [sequence omitted]

SEQ ID NO: 372 - protein, 44 aa, Homo sapiens [sequence omitted]

SEQ ID NO: 373 - protein, 58 aa, Homo sapiens
MLSLVKLLLLCIIHDHSINFCIAIQVGLLPSAYRVPGIVLSLENTALIRQTPCSNRAN

SEQ ID NO: 374 - protein, 187 aa, Homo sapiens
MRPLAGAPVPKRQKCDHWTPCPSDTYAYRLLSGGGRSKYAKICFEDNLLMGEQLGNVARGINIAIVNYVTGNVTATRCFDMYEGDNSGPMTKFIQSAAPKSLLFMVTYDDGSTRLNNDAKNAIEALGSKEIRNMKFRSSWVFIAAKGLELPSEIQREKINHSDAKNNRYSGWPAEIQIEGCIPKERS

SEQ ID NO: 375 - protein, 423 aa, Homo sapiens
MEDKRSLSMARCEERNSRGQDHGLERVPFPPQLQSETYLHPADPSPAWDDPGSTGSPNLRLLTEEIAFQPLAEEASFRRPHPDGDVPPQGEDNLLSLPFPQKLWRLVSSNQFSSIWWDDSGACRVINQKLFEKEILKRDVAHKVFATTSIKSFFRQLNLYGFRKRRQCTFRTFTRIFSAKRLVSILNKLEFYCHPYFQRDSPHLLVRMKRRVGVKSAPRHQEEDKPEAAGSCLAPADTEQQDHTSPNENDQVTPQHREPAGPNTQIRSGSAPPATPVMVPDSAVASDNSPVTQPAGEWSEGSQAHVTPVAAVPGPAALPFLYVPGSPTQMNSYGPVVALPTASRSTLAMDTTGLPAPGMLPFCHLWVPVTLVAAGAAQPAASMVMFPHLPALHHHCPHSHRTSQYMPASDGPQAYPDYADQST

SEQ ID NO: 376 - protein, 144 aa, Homo sapiens
MPGVGLLVSHFSTLVSRQRCPNYADPQNLTDVSIFLLLEVSGDPELQPVLAGLFLSMCLVTVLGNLLIILAISPDSHLHTPMYFFLSNLSLPDIGFTSTTVPKMIVDIQSHSRVISYAGCLTQMSLFAIFGGMEERHAPECDGL

SEQ ID NO: 377 - protein, 406 aa, Homo sapiens
MLLLLLLLPLLWGTKGMEGDRQYGDGYLLQVQELVTVQEGLCVHVPCSFSYPQDGWTDSDPVHGYWFRAGDRPYQDAPVATNNPDREVQAETQGRFQLLGDIWSNDCSLSIRDARKRDKGSYFFRLERGSMKWSYKSQLNYKTKQLSVFVTDPPWNLTMTVFQGDATASTALGNGSSLSVLEGQSLRLVCAVNSNPPARLSWTRGSLTLCPSRSSNPGLLELPRVHVRDEGEFTCRAQNAQGSQHISLSLSLQNEGTGTSRPVSQVTLAAVGGAGATALAFLSFCIIFIIVRSCRKKSARPAAGVGDTGMEDAKAIRGSASQGPLTESWKDGNPLKKPPPAVAPSSGEEGELHYATLSFHKVKPQDPQGQEATDSEYSEIKIHKRETAETQACLRNHNPSSKEVRG

SEQ ID NO: 378 - protein, 72 aa, Homo sapiens
MYYTLCNFVFFTLHMILFPKSLNILLSNQIRSAIVHLKQRTSCIKNQPEPYQRADAMNTNHSLVAVPYVNLI

SEQ ID NO: 379 - protein, 73 aa, Homo sapiens
MFWMVKILTPKASTFQVTTSVSVPLTSATGAACSGSCFHSTGCAGRPQTHAGAPCASEQNSRNEVMQTSTNEM

SEQ ID NO: 380 - protein, 92 aa, Homo sapiens
MHCRQLKEVLQLPLTCSSCCVCTMTVAFPSVQQVWMETVLTLGGLDAAQDEIQAVRLILLPESSPQGPHGNLAPCSAKPFFLPQVMPLGTAP

SEQ ID NO: 381 - protein, 266 aa, Homo sapiens
MVCLRLPGGSCMAVLTVTLMVLSSPLALAGDTRPRFLEYSTSECHFFNGTERVRFLDRYFYNQEEYVRFDSDVGEFRAVTELGRPDAEYWNSQKDLLEQKRGRVDNYCRHNYGVVESFTVQRRVHPKVTVYPSKTQPLQHHNLLVCSVSGFYPGSIEVRWFRNGQEEKTGVVSTGLIHNGDWTFQTLVMLETVPRSGEVYTCQVEHPSVTSPLTVEWRARSESAQSKMLSGVGGFVLGLLFLGAGLFIYFRNQKGHSGLQPRGFLS

SEQ ID NO: 382 - protein, 326 aa, Homo sapiens
MMSPSQASLLFLNVCIFICGEVVQGNCVHHSTDSSVVNIVEDGSNAKDESKSNDTVCKEDCEESCDVKTKITREEKHFMCRNLQNSIVSYTRSTKKLLRNMMDEQQASLDYLSNQVNELMNRVLLLTTEVFRKQLDPFPHRPVQSHGLDCTDIKDTIGSVTKTPSGLYIIHPEGSSYPFEVMCDMDYRGGGWTVIQKRIDGIIDFQRLWCDYLDGFGDLLGDAFRGLKKEDNQNAMPFSTSDVDNDGCRPACLVNGQSVKSCSHLHNKTGWWFNECGLANLNGIHHFSGKLLATGIQWGTWTKNNSPVKIKSVSMKIRRMYNPYFK

SEQ ID NO: 383 - protein, 70 aa, Homo sapiens
MRTWSKVIPSLWLKFSRGFIILRFHFLMIIWPDIPSSMYICMSFITAFKNLFMFGINRIKKISVVSRNTL

SEQ ID NO: 384 - protein, 404 aa, Homo sapiens
MASSGPAMLRGPWRFFWLFLLLLLPGAPDPRVRSRPWEGTDEPGSAWAWPGFQRLQEQLRAAGALSKRYWTLFSCQVWPDDCDEDEEAATGPLGWRLPLLGQRYLDLLTTWYCSFKDCCPRGDCRISNNFTGLEWDLNVRLHGQHLVQQLVLRTVRGYLETPQPEKALALSFHGWSGTGKNFVARMLVENLYRDGLMSDCVRMFIATFHFPHPKYVDLYKEQLMSQIRETQQLCHQTLFIFDEAEKLHPGLLEVLGPHLERRAPEGHRAESPWTIFLFLSNLRGDIINEVVLKLLKAGWSREEITMEHLEPHLQAEIVETIDNGFGHSRLVKENLIDYFIPFLPLEYRHVRLCARDAFLSQELLYKEETLDEIAQMMVYVPKEEQLFSSQGCKSISQRINYFLS

SEQ ID NO: 385 - protein, 38 aa, Homo sapiens
MLAMEVRKIKVTKNKKREKMLLLFMEEKGKYFKLTVNF

SEQ ID NO: 386 - protein, 45 aa, Homo sapiens
MLCSLFHILIVTLLLAISFGMSSRNTLNMVNSKIKEHSLHRKLEI

SEQ ID NO: 387 - protein, 69 aa, Homo sapiens
MFWTLVQGMSLLCLTDVFQALPSICIANSEIYYTVLTLMQFSCLWMVLSGKKVIFSSELMVRKGRRSWK

SEQ ID NO: 388 - protein, 48 aa, Homo sapiens
MYLKPLIYFSILIFLSQRSKLSLPYNVHNCMNIGEDRRPQKVQLLQLY

SEQ ID NO: 389 - protein, 49 aa, Homo sapiens [sequence omitted]

SEQ ID NO: 390 - protein, 236 aa, Homo sapiens
MTAEFLSLLCLGLCLGYEDEKKNEKPPKPSLHAWPSSVVEAESNVTLKCQAHSQNVTFVLRKVNDSGYKQEQSSAENEAEFPFTDLKPKDAGRYFCAYKTTASHEWSESSEHLQLVVTDKHDELEAPSMKTDTRTIFVAIFSCISILLLFLSVFIIYRCSQHSSSSEESTKRTSHSKLPEQEAAEADLSNMERVSLSTADPQGVTYAELSTSALFEAASDPTQEPPGFHEYAALKV

SEQ ID NO: 391 - protein, 305 aa, Homo sapiens
MPLLTLYLLLFWLSGYSIVTQITGPTTVNGLERGSLTVQCVYRSGWETYLKWWCRGAIWRDCKILVKTSGSEQEVKRDRVSIKDNQKNRTFTVTMEDLMKTDADTYWCGIEKTGNDLGVTVQVTIDPASTPAPTTPTSTTFTAPVTQEETSSSPTLTGHHLDNRHKLLKLSVLLPLIFTILLLLLVAASLLAWRMMKYQQKAAGMSPEQVLQPLEGDLCYADLTLQLAGTSPRKATTKLSSAQVDQVEVEYVTMASLPKEDISYASLTLGAEDQEPTYCNMGHLSSHLPGRGPEEPTEYSTISRP

SEQ ID NO: 392 - protein, 123 aa, Homo sapiens
MRISCPWCLWNLSLEVGGTVATTAQQHIAEVCRSSQAGRGFLHCLHPALGTSGCHPVPCSSSLVGFGWRGYSGEASWGRASSRPAAPTPPMPANVQAGWEQSVRLLCHSWLRLAALHVTHEES

SEQ ID NO: 393 - protein, 45 aa, Homo sapiens [sequence omitted]

SEQ ID NO: 394 - protein, 236 aa, Homo sapiens
MEFGLSCIFLAAILKGVQCEVQLVESGGGLVKPGGSLRLSCAASGFSFSKAYMNWVRQAPGKGLEWVGRIKTKKDAGTTDYAAPVKGRFTISRDDSENTLHLQLNSLKTEDTGIYYCCTDPTWYAAVGGSYWGQGTLVTVSSASTKGPSVFPLAPSSKSTSGGTAALGCLVKDYFPEPVTVSWNSGALTSGVHTFPAVLQSSGLYSLSSVVTVPSSSLGTQTYICNVNHKPVLRAL

SEQ ID NO: 395 - protein, 477 aa, Homo sapiens [sequence omitted]

SEQ ID NO: 396 - protein, 291 aa, Homo sapiens
MAMLLGASVLILWLQPDWVNSQQKNDDQQVKQNSPSLSVQEGRISILNCDYTNSMFDYFLWYKKYPAEGPTFLISISSIKDKNEDGRFTVFLNKSAKQFSLHIVPSQPGDSAVYFCAASSPFSYSGGGADGLTFGKGTHLIIQPYIQNPDPAVYQLRDSKSSDKSVCLFTDFDSQTNVSQSKDSDVYITDKTVLDMRSMDFKSNSAVAWSNKSDFACANAFNNSIIPEDTFFPSPESSCDVKLVEKSFETDTNLNFQNLSVIGFRILLLKVAGFNLLMTLRLWVQLRSARL

SEQ ID NO: 397 - protein, 48 aa, Homo sapiens
MVLRLPWWGVLAYGNDVGFGFYSFLCYQINPPTCPILWLWEVLTVGKS

SEQ ID NO: 398 - protein, 369 aa, Homo sapiens
MADSAQAQKLVYLVTGGCGFLGEHVVRMLLQREPRLGELRVFDQHLGPWLEELKTGPVRVTAIQGDVTQAHEVAAAVAGAHVVIHTAGLVDVFGRASPKTIHEVNVQGTRNVIEACVQTGTRFLVYTSSMEVVGPNTKGHPFYRGNEDTPYEAVHRHPYPCSKALAEWLVLEANGRKVRGGLPLVTCALRPTGIYGEGHQIMRDFYRQGLRLGGWLFRAIPASVEHGRVYVGNVAWMHVLAARELEQRAALMGGQVYFCYDGSPYRSYEDFNMEFLGPCGLRLVGARPLLPYWLLVFLAALNALLQWLLRPLVLYAPLLNPYTLAVANTTFTVSTDKAQRHFGYEPLFSWEDSRTRTILWVQAATGSAQ

SEQ ID NO: 399 - protein, 247 aa, Homo sapiens
MLGGKGLMSVRYLEIFFMKPLPPNIKDRLIKIMSMQGQITDSNISEILHPEVQTLDLRSCDISDAALLHLSNCRKLKKLNLNASKGNRVSVTSEGIKAVASSCSYLHEASLKRCCNLTDEGVVALALNCQLLKIIDLGGCLSITDVSLHALGKNCPFLQCVDFSATQVSDSGVIALVSGPCAKKLEEIHMGHCVNLTDGAVEAVLTYCPQIRILLFHGCPLITDHSREVLEQLVGPNKLKQVTWTVY

SEQ ID NO: 400 - protein, 567 aa, Homo sapiens
MDSILIPPLTKRLKMGKSLYLSVPQFPACNTYSCSLNLRDANEADTGTYFFQVERGYYMKYSYGNEKLFLHVTRPPLSLEPAVPERRTLRNRRSLAALAPLTPDMLLLLLPLLWGRERAEGQTSKLLTMQSSVTVQEGLCVHVPCSFSYPSHGWIYPGPVVHGYWFREGANTDQDAPVATNNPARAVWEETRDRFHLLGDPHTENCTLSIRDARRSDAGRYFFRMEKGSIKWNYKHHRLSVNVTALTHRPNILIPGTLESGCPQNLTCSVPWACEQGTPPMISWIGTSVSPLDPSTTRSSVLTLIPQPQDHGTSLTCQVTFPGASVTTNKTVHLNVSYPPQNLTMTVFQGDGTVSTVLGNGSSLSLPEGQSLRLVCAVDAVDSNPPARLSLSWRGLTLCPSQPSNPGVLELPWVHLRDEAEFTCRAQNPLGSQQVYLNVSLQSKATSGVTQGVVGGAGATALVFLSFCVIFVVVRSCRKKSARPAAGVGDTGIEDANAVRGSASQGPLTEPWAEDSPPDQPPPASARSSVGEGELQYASLSFQMVKPWDSRGQEATDTEYSEIKIHR

SEQ ID NO: 401 - protein, 58 aa, Homo sapiens
MLFGLALQLILDLKLTTVNQRESDVARVATAEEYSKKGLLGQETLHAGSQTRMQILIS

SEQ ID NO: 402 - protein, 70 aa, Homo sapiens
MLKLLCAAEVTNVLFNCVFDYGCPKTFCHPWTIFVLFWSSLEGGFIISYKTLTGALECRFLITLEIVTSE

SEQ ID NO: 403 - protein, 269 aa, Homo sapiens
MRSSLTMVGTLWAFLSLVTAVTSSTSYFLPYWLFGSQMGKPVSFSTFRRCNYPVRGEGHSLIMVEECGRYASFNAIPSLAWQMCTVVTGAGCALLLLVALAAVLGCCMEELISRMMGRCMGAAQFVGGLLISSGCALYPLGWNSPEIMQTCGNVSNQFQLGTCRLGWAYYCAGGGTPAAMLICPWLSCFAGRNPQPVILGGKHHEENHFLCYGAWPLPSTLELRKEDRGGRATGKQVTPQPLRFHVSTWMSSRLDRVYISITKIQIFQS

SEQ ID NO: 404 - protein, 261 aa, Homo sapiens
MKSSLTVVGTLWAFLSLVTAVTSSTSYFLPYWLFGSQMGKPVSFSTFRRCNYPVRGEGHSLIMVEECGRYASFNAIPSLAWQMCTVVTGAGCALLLLESLAAVLGCCMEELISRMMGRCMGAAQFVGGPMQPFCEAFPDLLLTSLADMNDPVTPRGIWGRMNGGGWGGGLLISSGCALYPLGWNSPEIMQTCGNVSNQFQLGTCRLGWAYYCAGGGAAAAMLICTWLSCFAGRNPKPVILVESIMRNTNSYAMELDHCLKP

SEQ ID NO: 405 - protein, 546 aa, Homo sapiens
MPAWETGGFLVTGLLANSQGFRMSLLSLPWLGLRPVATSPWLLLLLVVGSWLLARILAWTYAFYNNCRRLQCFPQPPKRNWFWGHLGLITPTEEGLKNSTQMSATYSQGFTIWLGPIIPFIVLCHPDTIRSITNASAAIAPKDNLFIRFLKPWLGEGILLSGGDKWSRHRRMLTPAFHFNILKSYITIFNKSANIMLDKWQHLASEGSSCLDMFEHISLMTLDSLQKCIFSFDSHCQERPSEYIATILELSALVEKRSQHILQHMDFLYYLSHDGRRFHRACRLVHDFTDAVIRERRRTLPTQGIDDFFKDKAKSKTLDFIDVLLLSKDEDGKALSDEDIRAEADTFMFGGHDTTASGLSWVLYNLARHPEYQERCRQEVQELLKDRDPKEIEWDDLAQLPFLTMCVKESLRLHPPAPFISRCCTQDIVLPDGRVIPKGITCLIDIIGVHHNPTVWPDPEVYDPFRFDPENSKGRSPLAFIPFSAGPRNCIGQAFAMAEMKVVLALMLLHFRFLPDHTEPRRKLELIMRAEGGLWLRVEPLNVSLQ

SEQ ID NO: 406 - protein, 568 aa, Homo sapiens
MPAWETGGFLVTGLLANSQGFRMSLLSLPWLGLRPVATSPWLLLLLVVGSWLLARILAWTYAFYNNCRRLQCFPQPPKRNWFWGHLGLITPTEEGLKNSTQMSATYSQGFTIWLGPIIPFIVLCHPDTIRSITNASAAIAPKDNLFIRFLKPWLGEGILLSGGDKWSRHRRMLTPAFHFNILKSYITIFNKSANIMLDKWQHLASEGSSCLDMFEHISLMTLDSLQKCIFSFDSHCQERPSEYIATILELSALVEKRSQHILQHMDFLYYLSHDGRRFHRACRLVHDFTDAVIRERRRTLPTQGIDDFFKDKAKSKTLDFIDVLLLSKDEDGKALSDEDIRAEADTFMFGGPQYLGAVHPPVLKPSLPGCSSGHDTTASGLSWVLYNLARHPEYQERCRQEVQELLKDRDPKEIEWDDLAQLPFLTMCVKESLRLHPPAPFISRCCTQDIVLPDGRVIPKGITCLIDIIGVHHNPTVWPDPGVYDPFRFDPENSKGRSPLAFIPFSAGPRNCIGQAFAMAEMKVVLALMLLHFRFLPDHTEPRRKLELIMRAEGGLWLRVEPLNVGLQ

SEQ ID NO: 407 - protein, 429 aa, Homo sapiens
MPQLSLSWLGLGQVAAFPWLLLLLAGASRLLAGFLAWTYAFYDNCRRLQYFPQPPKQKWFWGQPGPPAIAPKDDLSIRFLKPWLGEGILLSGGDKWSRHRRMLTPAFHFNILKPYIKIFNRSVNIMHDKWQHLASEGSSRLDMFEHISLMTLDSLQKCIFSFDSHCQERPSEYIATILELSALVEKRNQHILQHMDFLYYLSHDGWRFRRACRLVHDFTDAVIQERRHTLPTQGHDTTASGLSWVLYNLARHPEYQEHCRQEVQELLKDRDPKEIEWDDLAQLPFLTMCVKESLRLHPPAPFISRCCTQDIVLPDGRVIPKGITCLIDIIGVHHNPTVWPDPEVYDPFRFDPENSKGRSPLAFIPFSAGPRNCIGQAFAMAEMKVVLALMLLHFRFLPDHTEPRRKLELIMRAEGGLWLRVEPLNVSLQ

SEQ ID NO: 408 - protein, 47 aa, Homo sapiens
MMRRCTQPTCPLTCAVMPAELWLTRCGKIWQRQRPNFIPQTLGGGGS

SEQ ID NO: 409 - protein, 181 aa, Homo sapiens
MTLRPSLLPLHLLLLLLLSAAVCRAEAGLETESPVRTLQVETLGEPPKPCAEPAAFGDTLHIHYTGSLVDGRIIDTSLTRDPLVIELGQKQVIPGLEQSLLDMCVGEKRRAIIPSHLAYGKRGFPPSVPADAVVQYDVELIALIRANYWLKLVKGILPLVGMAMVPTPPGPHWVSPIQKGQ

SEQ ID NO: 410 - protein, 366 aa, Homo sapiens
MALRFLLGFLLAGVDLGVYLMRLELCDPTQRLRVALAGELVGVGGHFLFLGLALVSKDWRFLQRMITAPCILFLFYGWPGLFLESARWLIVKRQIEEAQSVLRILAERNRPHGQMLGEEAQEALQDLENTCPLPATSSFSFASLLNYRNIWKNLLILGFTNFIAHAIRHCYQPVGGGGSPSDFYLCSLLASGTAALACVFLGVTVDRFGRRGILLLSMTLTGIASLVLLGLWDYLNEAAITTFSVLGLFSSQAAAILSTLLAAEVIPTTVRGRGLGLIMALGALGGLSGPAQRLHMGHGAFLQHVVLAACALLCILSIMLLPETKRKLLPEVLRDGELCRRPSLLRQPPPTRCDHVPLLATPNPAL

SEQ ID NO: 411 - protein, 84 aa, Homo sapiens
MRPTNSGPTSSPRVQNALKVTVFKLNSKNAKAASSENKRREQDFKCISNPRARNRTTVNQPHHLVQDFLFTILKLGLSNTLIHS

SEQ ID NO: 412 - protein, 53 aa, Homo sapiens
MCLMKQIIYLLYVGLCSILTAFLFTPHHVLERYRYYCPDFREIKKLGQGYTTN

SEQ ID NO: 413 - protein, 105 aa, Homo sapiens
MKEALLKCSRLARGLLLCLDCANDHRSPVERNAQTTLILHSSLYSLSLGNQLQGGGEMATTGGSTQQAKTYGGLFQIGAMEPALFLLFIFLLASFWVHPSYRITY

SEQ ID NO: 414 - protein, 47 aa, Homo sapiens
MLETFLFKLFLFFTLLVNLFITNDQLSVGSIFLSFQLPAFFLDMAEF

SEQ ID NO: 415 - protein, 46 aa, Homo sapiens
MTFLLHVLVTALSSHSTGRRGTNCFMLLSSGNHPIPCGSLTPYPHL

SEQ ID NO: 416 - protein, 40 aa, Homo sapiens
MLILSHSKIQVNTPYSSVREVIIYKGAVMKSTDYLTSSMV

SEQ ID NO: 417 - protein, 54 aa, Homo sapiens
MTLLNLYYLNSFLLYSKRFEGISFCVQKVSIILCIHYLRSTTIWNKLFFRDVSA

SEQ ID NO: 418 - protein, 182 aa, Homo sapiens
MHFPVNCFFKSLHIFLLLQVFLATFLRKKLSKVAFSCLVEFFYYCYYFLDFASSVSFLFCFVLLLRRSLTLSPRLECSDTILAHCNLRLPGSRYSSASTSRVAGITGVHHHTYVNFVWTVQKAVHCVGQASWELLTSRDPPTLASHRAGITGMSHRTWAKVFLKRVIFLNREYDLTMFCFLK

SEQ ID NO: 419 - protein, 66 aa, Homo sapiens
MLVPTFLSLVCDFSLFVLLLLGCLSFLLPPHLPCTSFPLHLWRLLSPFISFLYLLLLLSYKMNCII

SEQ ID NO: 420 - protein, 74 aa, Homo sapiens
MLPLFKHSPVRIFLFCLNTQHLSVRNNFVFNCVSPGILPISLCLAFNHDRSTFFFSIILLLKALIILSSLLQTK

SEQ ID NO: 421 - protein, 78 aa, Homo sapiens
MKPILLVLSSITRALLLQISSVSWQSCMWRAMPDCLQTDYPISLGFHQRTRLLDALCPVTQCHHSAWPCVCQGAQTPI

SEQ ID NO: 422 - protein, 119 aa, Homo sapiens
MCCELLAVVIATLIIKIGLVVLLYFIKLLIHIEFIKRHSILKCESIFNLNVGIRMYPGQVNFCETLQMLDGFGRIFQTKWTNLYSYINSNFTKCCKNSGVLMVVKCRKENSALKECLTA

SEQ ID NO: 423 - protein, 859 aa, Homo sapiens
MACRWSTKESPRWRSALLLLFLAGVYGNGALAEHSENVHISGVSTACGETPEQIRAPSGIITSPGWPSEYPAKINCSWFIRANPGEIITISFQDFDIQGSRRCNLDWLTIETYKNIESYRACGSTIPPPYISSQDHIWIRFHSDDNISRKGFRLAYFSGKSEEPNCACDQFRCGNGKCIPEAWKCNNMDECGDSSDEEICAKEANPPTAAAFQPCAYNQFQCLSRFTKVYTCLPESLKCDGNIDCLDLGDEIDCDVPTCGQWLKYFYGTFNSPNYPDFYPPGSNCTWLIDTGDHRKVILRFTDFKLDGTGYGDYVKIYDGLEENPHKLLRVLTAFDSHAPLTVVSSSGQIRVHFCADKVNAARGFNATYQVDGFCLPWEIPCGGNWGCYTEQQRCDGYWHCPNGRDETNCTMCQKEEFPCSRNGVCYPRSDRCNYQNHCPNGSDEKNCFFCQPGNFHCKNNRCVFESWVCDSQDDCGDGSDEENCPVIVPTRVITAAVIGSLICGLLLVIALGCTCKLYSLRMFERRSFETQLSRVEAELLRREAPPSYGQLIAQGLIPPVEDFPVCSPNQASVLENLRLAVRSQLGFTSVRLPMAGRSSNIWNRIFNFARSRHSGSLALVSADGDEVVPSQSTSREPERNHTHRSLFSVESDDTDTENERRDMAGASGGVAAPLPQKVPPTTAVEATVGACASSSTQSTRGGHADNGRDVTSVEPPSVSPARHQLTSALSRMTQGLRWVRFTLGRSSSLSQNQSPLRQLDNGVSGREDDDDVEMLIPISDGSSDFDVNDCSRPLLDLASDQGQGLRQPYNATNPGVRPSNRDGPCERCGIVHTAQIPDTCLEVTLKNETSDDEALLLC

SEQ ID NO: 424 - protein, 57 aa, Homo sapiens
MTKLMSNRTRIRTHVNLCCFCRYTTPKMSFSSACVSLCLMLLFCSPPLLLLLLSSFV

SEQ ID NO: 425 - protein, 400 aa, Homo sapiens
MNKKKPLHSKSSRIHQQIIVQLDSLPPPVFSEQVMASMAAVLTWALALLSAFSATQARKGFWDYFSQTSGDKGRVEQIHQQKMAREPATLKDSLEQDLNNMNKFLEKLRPLSGSEAPRLPQDPVGMRRQLQEELEEVKARLQPYMAEAHELVGWNLEGLRQQLKPYTMDLMEQVALRVQELQEQLRVVGEDTKAQLLGGVDEAWALLQGLQSRVVHHTGRFKELFHPYAESLVSGIGRHVQELHRSVAPHAPASPARLSRCVQVLSRKLTLKAKALHARIQQNLDQLREELSRAFAGTGTEEGAGPDPQMLSEEVRQRLQAFRQDTYLQIAAFTRAIDQETEEVQQQLAPPPPGHSAFAPEFQQTDSGKVLSKLQARLDDLWEDITHSLHDQGHSHLGDP

SEQ ID NO: 426 - protein, 47 aa, Homo sapiens
MFIGLGISFLNCPSLFAHFILFCPLPLFGIFISYWFVRLLSINRGWK

SEQ ID NO: 427 - protein, 313 aa, Homo sapiens
MMKIPHQTQKKRSLEDPNSRPRRRIFRCFHLVIRTEQRELTMEFGLSWLFLVAILKGVQCEVQLLESGGGLVQPGGSLRLSCAASGFTFSSYAMSWVRQAPGKGLEWVSAISGSGGSTYYADSVKGRFTISRDNSKNTLYLQMNSLRAEDTAVYYCAKSHPGYYYDSSGYSYYFDYWGQGTLVTVSSSDIQMTQSPSTLSASVGDRVTITCRASQSISSWLAWYQQKPGKAPKLLIYKASSLESGVPSRFSGSGSGTEFTLTISSLQPDDFATYYCQQYNSYLRGRSAKGPRWKSNELWLHHLSSSSRHLMSS

SEQ ID NO: 428 - protein, 317 aa, Homo sapiens
MKRLSLVTTNRLSPHGNFFTLCTFPLAVDMAALFQEASSCPVCSDYLEKPMSLECGCAVCLKCINSLQKEPHGEDLLCCYSSMVSRKNKIRRNRQLERLASHIKELEPKLKKILQMNPRMRKFQVDMTLDANTANNFLLISDDLRSVRSGRIRQNRQDLAERFDVSVCILGSPRFTCGRHCWEVDVGTSTEWDLGVCRESVHRKGRIQLTTELGFWTVSLRDGGRLSASTVPLTFLFVDRKLQRVGIFLDMGMQNVSFFDAEGGSHVYTFRSVSAEEPLCPFLAPSIPPNGDQGVLSICPLMNSGTTDAPVRPGEAK

SEQ ID NO: 429 - protein, 212 aa, Homo sapiens
MYRLSSSMLLRALAQAMRTGHLIGQSLHSSAVAATYKYVNKKEQESEVDMKSETDNAARILMWTELIRGLGMTLRYLFREPATINYPFEKGPLSPRFRGEHALRRYPSGEERCIACKLCEAICPAQAITIEAEPRADGSRRTTRYDIDMTKCIYCGFCQEACPVDAIVEGPNFEFSTETHEELLYNKEKLLNNGDKWEAEIAANIQADYLYR

SEQ ID NO: 430 - protein, 69 aa, Homo sapiens
MIELAFASFLKCASFSLVILVSFSFPLWFFLSCFACSYSFSCLLSRISILSPFCHLLPRQSHDLCTNDL

SEQ ID NO: 431 - protein, 62 aa, Homo sapiens
MSVLIWCLIFFPLEYSRPKRGLKVDNVCFSTVALSTGSRISNWSNCETCLLAEMFFLDLGFS

SEQ ID NO: 432 - protein, 318 aa, Homo sapiens
MAAAAVSGALGRAGWRLLQLRCLPVARCRQALVPRAFHASAVGLRSSDEQKQQPPNSFSQQHSETQGAEKPDPESSHSPPRYTDQGGEEEEDYESEEQLQHRILTAALEFVPAHGWTAEAIAEGAQSLGLSSAAASMFGKDGSELILHFVTQCNTRLTRVLEEEQKLVQLGQAEKRKTDQFLRDAVETRLRMLIPYIEHWPRALSILMLPHNIPSSLSLLTSMVDDMWHYAGDQSTDFNWYTRRAMLAAIYNTTELVMMQDSSPDFEDTWRFLENRVNDAMNMGHTAKQVKSTGEALVQGLMGAAVTLKNLTGLNQRR

SEQ ID NO: 433 - protein, 56 aa, Homo sapiens
MGHLLCVWGFTYILPCISLRHSPLQPPGWEGFCRNVSFPLLRASLAPHHRRKDGFI

SEQ ID NO: 434 - protein, 83 aa, Homo sapiens
MHVLIRTPCSLILCLANSSHASLPGFSASSFLFKESCRLLLNSSFLLHGLEILSGAIAGKCNSFCLFSISQGSLSFNASCPLP

SEQ ID NO: 435 - protein, 141 aa, Homo sapiens
MARPTSSLCLLLYFFSTGKSVPVSILPGVVRMLLPPPPHLLPGQPACPAAVMCDKEFMWALKNGDLDEVKDYVAKGEDVNRTLEGGRKPLHYAADCGQLEILEFLLLKGADINAPDKHHITPLLSAVYEGHVSCVKLLLSK

SEQ ID NO: 436 - protein, 50 aa, Homo sapiens
MSLKSKKSKTSCIYMFWSCLIGFFFLLTYPPLNPYLPRSSPSCKWHQCPS

SEQ ID NO: 437 - protein, 90 aa, Homo sapiens
MFLVFCNIITVITMTSLFLILLSCIFILITCCYKCRYISFSFTFSVTPSGFFVSILQYLAHILLLITLQFHFRVCYVNIITLIPLAQIFL

SEQ ID NO: 438 - protein, 83 aa, Homo sapiens
MENNLILTCWGRCAAHPVELMGVTAKTKVKPLLPRAQKQREEQGKFKFKKPHSCIKKSRNLSSRLCENYVCWKLVSSPRLGQK

SEQ ID NO: 439 - protein, 76 aa, Homo sapiens [sequence omitted]

SEQ ID NO: 440 - protein, 96 aa, Homo sapiens
MGISCKLLLLTRVCYLITPLDLERFPFPNTEQVTFPERRVSVFLLPLSWCLDTRLPREPGCRCRHSSPQDVVGGSHLVTTTLLSLPAREFWTSCIL

SEQ ID NO: 441 - protein, 45 aa, Homo sapiens
MILFHCEKLYALRSFDFWFMLELLSTWPRALGLLCPGLAIEAHEG

SEQ ID NO: 442 - protein, 78 aa, Homo sapiens [sequence omitted]

SEQ ID NO: 443 - protein, 51 aa, Homo sapiens
MTPREPAQERRPHLEGPTLKASDGETWCELRGDEMRRSSAPCLVGSPGPTC

SEQ ID NO: 444 - protein, 388 aa, Homo sapiens
MESRMWPALLLSHLLPLWPLLLLPLPPPAQDSSSSPRTPPAPARPPCARGGPSAPRHVCVWERAPPPSRSPRVPRSRRQVLPGTAPPATPSGFEEGPPSSQYPWAIVWGPTVSREDGGDPNSANPGFLDYGFAAPHGLATPHPNSDSMRGDGDGLILGEAPATLRPFLFGGRGEGVDPQLYVTITISIIIVLVATGIIFKFCWDRSQKRRRPSGQQGALRQEESQQPLTDLSPAGVTVLGAFGDSPTPTPDHEEPRGGPRPGMPHPKGAPAFQLNRSLSGQRFLHTLPLMCVSRPDVVVVCGVLTLSLMNTHPPRFRSPCMLLQRWVGGELGAPWALIGHGLVPFHTICFSVSPSYSKDAGITLRAPPWEWGSEAPDFTPSPLLKSVF

SEQ ID NO: 445 - protein, 338 aa, Homo sapiens
MDFLVLFLFYLASVLMGLVLICVCSKTHSLKGLARGGAQIFSCIIPECLQRAMHGLLHYLFHTRNHTFIVLHLVLQGMVYTEYTWEVFGYCQELELSLHYLLLPYLLLGVNLFFFTLTCGTNPGIITKANELLFLHVYEFDEVMFPKNVRCSTCDLRKPARSKHCSVCNWCVHRFDHHCVWVNNCIGAWNIRYFLIYVLTLTASAATVAIVSTTFLVHLVVMSDLYQETYIDDLGHLHVMDTVFLIQYLFLTFPRIVFMLGFVVVLSFLLGGYLLFVLYLAATNQTTNEWYRGDWAWCQRCPLVAWASVSRAPSPPEHSLPWASEQPSRDLSTCLSMS

SEQ ID NO: 446 - protein, 138 aa, Homo sapiens
MKVRRGSSSSLTHRPAPSPATPRLLGTRRVLLGVSEGTGCADAMELVLVFLCSLLAPMVLASAAEKEKEMDPFHYDYQTLRIGGLVFAVVLFSVGILLILSRRCKCSFNQKPRAPGDEEAQVENLITANATEPQKAEN

SEQ ID NO: 447 - protein, 382 aa, Homo sapiens
MLRWTVHLEGGPRRVNHAAVAVGHRVYSFGGYCSGEDYETLRQIDVHIFNAVSLRWTKLPPVKSAIRGQAPVVPYMRYGHSTVLIDDTVLLWGGRNDTEGACNVLYAFDVNTHKWFTPRVSGTVPGARDGHSACVLGKIMYIFGGYEQQADCFSNDIHKLDTSTMTWTLICTKGSPARWRDFHSATMLGSHMYVFGGRADRFGPFHSNNEIYCNRIRVFDTRTEAWLDCPPTPVLPEGRRSHSAFGYNGELYIFGGYNARLNRHFHDLWKFNPVSFTWKKIEPKGKGPCPRRRQCCCIVGDKIVLFGGTSPSPEEGLGDEFDLIDHSDLHILDFSPSLKTLCKLAVIQYNLDQSCLPHDIRWELNAMTTNSNISRPIVSSHG

SEQ ID NO: 448 - protein, 428 aa, Homo sapiens
MAENDVDNELLDYEDDEVETAAGGDGAEAPAKKDVKGSYVSIHSSGFRDFLLKPELLRAIVDCGFEHPSEVQHECIPQAILGMDVLCQAKSGMGKTAVFVLATLQQLEPVTGQVSVLVMCHTRELAFQISKEYERFSKYMPNVKVAVFFGGLSIKKDEEVLKKNCPHIVVGTPGRILALARNKSLNLKHIKHFILDECDKMLEQLDMRRDVQEIFRMTPHEKQVMMFSATLSKEIRPVCRKFMQDPMEIFVDDETKLTLHGLQQYYVKLKDNEKNRKLFDLLDVLEFNQVVIFVKSVQRCIALAQLLVEQNFPAIAIHRGMPQEERLSRYQQFKDFQRRILVATNLFGRGMDIERVNIAFNYDMPEDSDTYLHRVARAGRFGTKGLAITFVSDENDAKILNDVQDRFEVNISELPDEIDISSYIEQTR

SEQ ID NO: 449 - protein, 402 aa, Homo sapiens
MAENDVDNELLDYEDDEVETAAGGDGAEAPAKKDVKGSYVSIHSSGFRDFLLKPELLRAIVDCGFEHPSEVQHECIPQAILGMDVLCQAKSGMGKTAVFVLATLQQLEPVTGQVSVLVMCHTRELAFQISKEYERFSKYMPNVKVAVFFGGLSIKKDEEVLKKNCPHIVVGTPGRILALARNKSLNLKHIKHFILDECDKMLEQLDMRRDVQEIFRMTPHEKQVMMFSATLSKEIRPVCRKFMQDPMEIFVDDETKLTLHGLQQYYVKLKDNEKNRKLFDLLDVLEFNQVVIFVKSVQRCIALAQQFKDFQRRILVATNLFGRGMDIERVNIAFNYDMPEDSDTYLHRVARAGRFGTKGLAITFVSDENDAKILNDVQDRFEVNISELPDEIDISSYIEQTR

SEQ ID NO: 450 - protein, 352 aa, Homo sapiens
MRSLGALLLLLSACLAVSAGPVPTPPDNIQVQENFNISRIYGKWYNLAIGSTCPWLKKIMDRMTVSTLVLGEGATEAEISMTSTRWRKGVCEETSGAYEKTDTDGKFLYHKSKWNITMESYVVHTNYDEYAIFLTKKFSRHHGPTITAKLYGRAPQLRETLLQDFRVVAQGVGIPEDSIFTMADRGECVPGEQEPEPILIPRVRRAVLPQEEEGSGGGQLVTEVTKKEDSCQLGYSAGPCMGMTSRYFYNGTSMACETFQYGGCMGNGNNFVTEKECLQTCRTVAACNLPIVRGPCRAFIQLWAFDAVKGKCVLFPYGGCQGNGNKFYSEKECREYCGVPGDGDEELLRFSN

SEQ ID NO: 451 - protein, 456 aa, Homo sapiens
MFLLLPFDSLIVNLLGISLTVLFTLLLVFIIVPAIFGVSFGIRKLYMKSLLKIFAWATLRMERGAKEKNHQLYKPYTNGIIAKDPTSLEEEIKEIRRSGSSKALDNTPEFELSDIFYFCRKGMETIMDDEVTKRFSAEELESWNLLSRTNYNFQYISLRLTVLWGLGVLIRYCFLLPLRIALAFTGISLLVVGTTVVGYLPNGRFKEFMSKHVHLMCYRICVRALTAIITYHDRENRPRNGGICVANHTSPIDVIILASDGYYAMVGQVHGGLMGVIQRAMVKACPHVWFERSEVKDRHLVAKRLTEHVQDKSKLPILIFPEGTCINNTSVMMFKKGSFEIGATVYPVAIKYDPQFGDAFWNSSKYGMVTYLLRMMTSWAIVCSVWYLPPMTREADEDAVQFANRVKSAIARQGGLVDLLWDGGLKREKVKDTFKEEQQKLYSKMIVGNHKDRSRS

SEQ ID NO: 452 - protein, 467 aa, Homo sapiens
MLLLLLLPLLWGRERVEGQKSNRKDYSLTMQSSVTVQEGMCVHVRCSFSYPVDSQTDSDPVHGYWFRAGNDISWKAPVATNNPAWAVQEETRDRFHLLGDPQTKNCTLSIRDARMSDAGRYFFRMEKGNIKWNYKYDQLSVNVTALTHRPNILIPGTLESGCFQNLTCSVPWACEQGTPPMISWMGTSVSPLHPSTTRSSVLTLIPQPQHHGTSLTCQVTLPGAGVTTNRTIQLNVSYPPQNLTVTVFQGEGTASTALGNSSSLSVLEGQSLRLVCAVDSNPPARLSWTWRSLTLYPSQPSNPLVLELQVHLGDEGEFTCRAQNSLGSQHVSLNLSLQQEYTGKMRPVSGVLLGAVGGAGATALVFLSFCVIFIVVRSCRKKSARPAADVGDIGMKDANTIRGSASQGNLTESWADDNPRHHGLAAHSSGEEREIQYAPLSFHKGEPQDLSGQEATNNEYSEIKIPK

SEQ ID NO: 453 - protein, 374 aa, Homo sapiens
MLLLLLLPLLWGRERVEGQKSNRKDYSLTMQSSVTVQEGMCVHVRCSFSYPVDSQTDSDPVHGYWFRAGNDISWKAPVATNNPAWAVQEETRDRFHLLGDPQTKNCTLSIRDARMSDAGRYFFRMEKGNIKWNYKYDQLSVNVTDPPQNLTVTVFQGEGTASTALGNSSSLSVLEGQSLRLVCAVDSNPPARLSWTWRSLTLYPSQPSNPLVLELQVHLGDEGEFTCRAQNSLGSQHVSLNLSLQQEYTGKMRPVSGVLLGAVGGAGATALVFLSFCVIFIVVRSCRKKSARPAADVGDIGMKDANTIRGSASQGNLTESWADDNPRHHGLAAHSSGEEREIQYAPLSFHKGEPQDLSGQEATNNEYSEIKIPK

SEQ ID NO: 454 - protein, 3674 aa, Homo sapiens
MAGQPHSPRELLGAAGHRSRRPSTELRVPPSPSLTMDSQYETGHIRKLQARHMQMQEKTFTKWINNVFQCGQAGIKIRNLYTELADGIHLLRLLELISGEALPPPSRGRLRVHFLENSSRALAFLRAKVPVPLIGPENIVDGDQTLILGLIWVIILRFQISHISLDKEEFGASAALLSTKEALLVWCQRKTASYTNVNITDFSRSWSDGLGFNALIHAHRPDLLDYGSLRPDRPLHNLAFAFLVAEQELGIAQLLDPEDVAAAQPDERSIMTYVSLYYHYCSRLHQGQTVQRRLTKILLQLQETELLQTQYEQLVADLLRWIAEKQMQLEARDFPDSLPAMRQLLAAFTIFRTQEKPPRLQQRGAAEALLFRLQTALQAQNRRPFLPHEGLGLAELSQCWAGLEWAEAARSQALQQRLLQLQRLETLARRFQRKAALRESFLKDAEQVLDQARAPPASLATVEAAVQRLGMLEAGILPQEGRFQALAEIADILRQEQYHSWADVARRQEEVTVRWQRLLQHLQGQRKQVADMQAVLSLLQEVEAASHQLEELQEPARSTACGQQLAEVVELLQRHDLLEAQVSAHGAHVSHLAQQTAELDSSLGTSVEVLQAKARTLAQLQQSLVALVRARRALLEQTLQRAEFLRNCEEEEAWLKECGQRVGNAALGRDLSQIAGALQKHKALEAEVHRHQAVCVDLVRRGRDLSARRPPTQPDPGERAEAVQGGWQLLQTRVVGRGARLQTALLVLQYFADAAEAASWLRERRSSLERASCGQDQAAAETLLRRHVRLERVLRAFAAELRRLEEQGRAASARASLFTVNSALSPPGESLRNPGPWSEASCHPGPGDAWKMALPAEPDPDFDPNTILQTQDHLSQDYESLRALAQLRRARLEEAMALFGFCSSCGELQLWLEKQTVLLQRVQPQADTLEVMQLKYENFLTALAVGKGLWAEVSSSAEQLRQRYPGNSTQIQRQQEELSQRWGQLEALKREKAVQLAHSVEVCSFLQECGPTQVQLRDVLLQLEALQPGSSEDTRHALQLAQKKTLVLERRVYFLQSVVVKVEEPGYAESQPLQGQVETLQGLLKQVQEQVAQRARRQAETQARQSFLQESQQLLLWAESVQAQLRSKEVSVDVASAQRLLREHQDLLEEIHLWQERLQQLDAQSQPMAALDCPDSQEVPNTLRVLGQQGQELKVLWEQRQQWLQEGLELQKFGREVDGFTATCANHQAWLHLDNLGEDVREALSLLQQHREFGRLLSTLGPRAEALRAHGEKLVQSQHPAAHTVREQLQSIQAQWTRLQGRSEQRRRQLLASLQLQEWKQDVAELMQWMEEKGLMAAHEPSGARRNILQTLKRHEAAESELLATRRHVEALQQVGRELLSRRPCGQEDIQTRLQGLRSKWEALNRKMTERGDELQQAGQQEQLLRQLQDAKEQLEQLEGALQSSETGQDLRSSQRLQKRHQQLESESRTLAAKMAALASMAHGMAASPAILEETQKHLRRLELLQGHLAIRGLQLQASVELHQFCHLSNMELSWVAEHMPHGSPTSYTECLNGAQSLHRKHKELQVEVKAHQGQVQRVLSSGRSLAASGHPQAQHIVEQCQELEGHWAELERACEARAQCLQQAVTFQQYFLDVSELEGWVEEKRPLVSSRDYGRDEAATLRLINKHQALQEELAIYWSSMEELDQTAQTLTGPEVPEQQRVVQERLREQLRALQELAATRDRELEGTLRLHEFLREAEDLQGWLASQKQAAKGGESLGEDPEHALHLCTKFAKFQHQVEMGSQRVAACRLLAESLLERGHSAGPMVRQRQQDLQTAWSELWELTQARGHALRDTETTLRVHRDLLEVLTQVQEKATSLPNNVARDLCGLEAQLRSHQGLERELVGTERQLQELLETAGRVQKLCPGPQAHAVQQRQQAVTQAWAVLQRRMEQRRAQLERARLLARFRTAVRDYASWAARVRQDLQVEESSQEPSSGPLKLSAHQWLRAELEAREKLWQQATQLGQQALLAAGTPTKEVQEELRALQDQRDQVYQTWARKQERLQAEQQEQLFLRECGRLEEILAAQEVSLKTSALGSSVEEVEQLIRKHEVFLKVLTAQDKKEAALRERLKTLRRPRVRDRLPILLQRRMRVKELAESRGHALHASLLMASFTQAATQAEDWIQAWAQQLKEPVPPGDLRDKLKPLLKHQAFEAEVQAHEEVMTSVAKKGEALLAQSHPRAGEVSQRLQGLRKHWEDLRQAMALRGQELEDRRNFLEFLQRVDLAEAWIQEKEVKMNVGDLGQDLEHCLQLRRRLREFRGNSAGDTVGDACIRSISDLSLQLKNRDPEEVKIICQRRSQLNNRWASFHGNLLRYQQQLEGALEIHVLSRELDNVTKRIQEKEALIQALDCGKDLESVQRLLRKHEELEREVHPIQAQVESLEREVGRLCQRSPEAAHGLRHRQQEVAESWWQLRSRAQKRREALDALHQAQKLQAMLQELLVSAQRLRAQMDTSPAPRSPVEARRMLEEHQECKAELDSWTDSISLARSTGQQLLTAGHPFSSDIRQVLAGLEQELSSLEGAWQEHQLQLQQALELQLFLSSVEKMERWLCSKEDSLASEGLWDPLAPMEPLLWKHKMLEWDLEVQAGKISALEATARGLHQGGHPEAQSALGRCQAMLLRKEALFRQAGTRRHRLEELRQLQAFLQDSQEVAAWLREKNLVALEEGLLDTAMLPAQLQKQQNFQAELDASMHQQQELQREGQRLLQGGHPASEAIQERLEELGALWGELQDNSQKKVAKLQKACEALRLRRSMEELENWLEPIEVELRAPTVGQALPGVGELLGTQRELEAAVDKKARQAEALLGQAEAFVREGHCLARDVEEQARRLLQRFKSLREPLQERRTALEARSLLLKFFRDADEEMAWVQEKLPLAAAQDYGQSLSAVRHLQEQHQNLESEMSSHEALTRVVLGTGYKLVQAGHFAAHEVAARVQQLEKAMAHLRAEAARRRLLLQQAQEAQQFLTELLEAGSWLAERGHVLDSEDMGHSAEATQALLRRLEATKRDLEAFSPRIERLQQTAALLESRKNPESPKVLAQLQAVREAHAELLRRAEARGHGLQEQLQLHQLERETLLLDAWLTTKAATAESQDYGQDLEGVKVLEEKFDAFRKEVQSLGQAKVYALRKLAGTLERGAPRRYPHIQAQRSRIEAAWERLDQAIKARTENLAAAHEVHSFQQAAAELQGRMQEKTALMKGEDGGHSLSSVRTLQQQHRRLERELEAMEKEVARLQTEACRLGQLHPAAPGGLAKVQEAWATLQAKAQERGQWLAQAAQGHAFLGRCQELLAWAQERQELASSEELAEDVAGAEQLLGQHEELGQEIRECRLQAQDLRQEGQQLVDNSHFMSAEVTECLQELEGRLQELEEAWALRWQRCAESWGLQKLRQRLEQAEAWLACWEGLLLKPDYGHSVSDVELLLHRHQDLEKLLAAQEEKFAQMQKTEMEQELLLQPQELKPGRAGSSLTSFQWRPSGHQGLGAQLAETRDPQDAKGTPTMEGSLEFKQHLLPGGRQPSSSSWDSCRGTLQGSSLSLFLDERMAAEKVASIALLDLTGARCERLRGRHGRKHTFSLRLTSGAEILFAAPSEEQAESWWRALGSTAAQSLSPKLKAKPVSSLNECTTKDARPGCLLRSDP

SEQ ID NO: 455 - protein, 672 aa, Homo sapiens
MLCWKTTSGRLKDILAILLTDVLLLLQEKDQKYVFASVDSKPPVISLQKLIVREVANEEKAMFLISASLQGPEMYEIYTSSKEDRNAWMAHIQRAVESCPDEEEGPFSLPEEERKVVEARATRLRDFQERLSMKDQLIAQSLLEKQQIYLEMAEMGGLEDLPQPRGLFRGGDPSETLQGELILKSAMSEIEGIQSLICRQLGSANGQAEDGGSSTGPPRRAETFAGYDCTNSPTKNGSFKKKVSSTDPRPRDWRGPPNSPDLKLSDSDIPGSSEESPQVVEAPGTESDPRLPTVLESELVQRIQTLSQLLLNLQAVIAHQDSYVETQRAAIQEREKQFRLQSTRGNLLLEQERQRNFEKQREERAALEKLQSQLRHEQQRWERERQWQHQELERAGARLQEREGEARQLRERLEQERAELERQRQAYQHDLERLREAQRAVERERERLELLRRLKKQNTAPGALPPDTLAEAQPPSHPPSFNGEGLEGPRVSMLPSGVGPEYAERPEVARRDSAPTESRLAKSDVPIQLLSATNQFQRQAAVQQQIPTKLAASTKGGKDKGGKSRGSQRWESSASFDLKQQLLLNKLMGKDESTSRNRRSLSPILPGRHSPAPPPDPGFPAPSPPPADSPSEGFSLKAGGTALLPGPPAPSPLPATPLSAKEDASKEDVIFF

SEQ ID NO: 456 - protein, 462 aa, Homo sapiens [sequence omitted]

SEQ ID NO: 457 - protein, 366 aa, Homo sapiens
MQLHMSTLKERDQFFSELQEIQRTSTPRPDWTKCKDVVAGGPERWQMLAEGKNSDQLVDVLLEEIGSGLLREKDFFPGLGYGEAIPAFLRFDGLVENKKPSKKDVVNLLKDAWKERLAEEQKETFPDFFFNFLEHRFGPSDAMAWAYTIFENIKIFHSNEVMSQFYAVLMGKRSENVYVTQKETVAQLLKEMTNADSQNEGLLTMEQFNTVLKSTFPLKTEEQIQELMEAGGWHPSSSNADLLNYRSLFMEDEEGQSEPFVQKLWEQYMDEKDEYLQQLKQELGIELHEEVTLPKLRGGLMTIDPSLDKQTVNTYMSQAFQLPESEMPEEGDEKEEAVVEILQTALERLQVIDIRRVGPREPEPAS

SEQ ID NO: 458 - protein, 513 aa, Homo sapiens
MASVLSRRLGKRSLLGARVLGPSASEGPSAAPPSEPLLEGAAPQPFTTSDDTPCQEQPKEVLKAPSTSGLQQVAFQPGQKVYVWYGGQECTGLVEQHSWMEGQVTVWLLEQKLQVCCRVEEVWLAELQGPCPQAPPLEPGAQALAYRPVSRNIDVPKRKSDAVEMDEMMAAMVLTSLSCSPVVQSPPGTEANFSASRAACDPWKESGDISDSGSSTTSGHWSGSSGVSTPSPPHPQASPKYLGDAFGSPQTDHGFETDPDPFLLDEPAPRKRKNSVKVMYKCLWPNCGKVLRSIVGIKRHVKALHLGDTVDSDQFKREEDFYYTEVQLKEESAAAAAAAAAGTPVPGTPTSEPAPTPSMTGLPLSALPPPLHKAQSSGPEHPGPESSLPSGALSKSAPGSFWHIQADHAYQALPSFQIPVSPHIYTSVSWAAAPSAACSLSPVRSRSLSFSEPQQPAPAMKSHLIVTSPPRAQSGARKARGEAKKCRKVYGIEHRDQWCTACRWKKACQRFLD

SEQ ID NO: 459 - protein, 774 aa, Homo sapiens
MAHEAMEYDVQVQLNHAEQQPAPAGMASSQGGPALLQPVPADVVSSQGVPSILQPAPAEVISSQATPPLLQPAPQLSVDLTEVEVLGEDNVENINPRTSEQHRQGSDGNHTIPASSLHSMTNFISGLQRLHGMLEFLRPSSSNHSVGPMRTRRRVSASRRARAGGSQRTDSARLRAPLDAYFQVSRTQPDLPATTYDSETRNPVSEELQVSSSSDSDSDSSAEYGGVVDQAEESGAVILEEQLAGVSAEQEVTCIDGGKTLPKQPSPQKSEPLLPSASMDEEEGDTCTICLEQWTNAGDHRLSALRCGHLFGYRCISTWLKGQVRKCPQCNKKARHSDIVVLYARTLRALDTSEQERMKSSLLKEQMLRKQAELESAQCRLQLQVLTDKCTRLQRRVQDLQKLTSHQSQNLQQPRGSQAWVLSCSPSSQGQHKHKYHFQKTFTVSQAGNCRIMAYCDALSCLVISQPSPQASFLPGFGVKMLSTANMKSSQYIPMHGKQIRGLAFSSYLRGLLLSASLDNTIKLTSLETNTVVQTYNAGRPVWSCCWCLDETNYIYAGLANGSILVYDVRNTSSHVQELVAQKARCPLVSLSYMPRAASAAFPYGGVLAGTLEDASFWEQKMDFSHWPHVLPLEPGGCIDFQTENSSRHCLVTYRPDKNHTTIRSVLMEMSYRLDDTGNPICSCQPVHTFFGGPTCKLLTKNAIFQSPENDGNILVCTGDEAANSALLWDAASGSLLQDLQTDQPVLDICPFEVNRNSYLATLTEKMVHIYKWE

SEQ ID NO: 460 - protein, 188 aa, Homo sapiens
MVPGAAGWCCLVLWLPACVAAHGFRIHDYLYFQVLSPGDIRYIFTATPAKDFGGIFHTRYEQIHLVPAEPPEACGELSNGFFIQDQIALVERGGCSFLSKTRVVQEHGGRAVIISDNAVDNDSFYVEMIQDSTQRTADIPALFLLGRDGYMIRRSLEQHGLPWAIISIPVNVTSIPTFELLQPPWTFW

SEQ ID NO: 461 - protein, 445 aa, Homo sapiens
MAAPTPARPVLTHLLVALFGMGSWAAVNGIWVELPVVVKELPEGWSLPSYVSVLVALGNLGLLVVTLWRRLAPGKDEQVPIRVVQVLGMVGTALLASLWHHVAPVAGQLHSVAFLALAFVLALACCASNVTFLPFLSHLPPRFLRSFFLGQGLSALLPCVLALVQGVGRLECPPAPINGTPGPPLDFLERFPASTFFWALTALLVASAAAFQGLLLLLPPPPSVPTGELGSGLQVGAPGAEEEVEESSPLQEPPSQAAGTTPGPDPKAYQLLSARSACLLGLLAATNALTNGVLPAVQSFSCLPYGRLAYHLAVVLGSAANPLACFLAMGVLCRSLAGLGGLSLLGVFCGGYLMALAVLSPCPPLVGTSAGVVLVVLSWVLCLGVFSYVKVAASSLLHGGGRPALLAAGVAIQVGSLLGAVAMFPPTSIYHVFHSRKDCADPCDS

SEQ ID NO: 462 - protein, 118 aa, Homo sapiens
MILMVFQWKYTSLPRSSTLMDWNLQFSLLLWATADISDQLFQPPQKFSWDPLESALCLYSSGSAKDLKGEMQSFWYPARKSPPLHLPALQLFYFGELPCKFLPALVVPGSTLPPSRPL

SEQ ID NO: 463 - protein, 85 aa, Homo sapiens
MKITGGLLLLCTVVYFCSSSEAASLSPKKVDCSIYKKYPVVAIPCPITYLPVCGSDYITYGNECHLCTESLKSNGRVQFLHDGSC

SEQ ID NO: 464 - protein, 266 aa, Homo sapiens [sequence omitted]

SEQ ID NO: 465 - protein, 347 aa, Homo sapiens
MQYMYFKAEPYAADEGSGEGHKWLMVHVDKRITLAAFKQHLEPFVGVLSSHFKVFRVYASNQEFESVRLNETLSSFSDDNKITIRLGRALKKGEYRVKVYQLLVNEQEPCKFLLDAVFAKGMTVRQSKEELIPQLREQCGLELSIDRFRLRKKTWKNPGTVFLDYHIYEEDINISSNWEVFLEVLDGVEKMKSMSQLAVLSRRWKPSEMKLDPFQEVVLESSSVDELREKLSEISGIPLDDIEFAKGRGTFPCDISVLDIHQDLDWNPKVSTLNVWPLYICDDGGVIFYRDKTEELMELTDEQRNELMKKESSRLQKTGHRVTYSPRKEKALKIYLDGAPNKDLTQD

SEQ ID NO: 466 - protein, 104 aa, Homo sapiens
MLAHLSFERSLILHLIFSGIAVSIKALTKTWMPPEMGSSPVYKAFSLLQCRLSAQKWGSCHSQNTLHWPVWGPQTTLPSSQASFVGWAHSHSPLAVPASSDCVL

SEQ ID NO: 467 - protein, 106 aa, Homo sapiens
MALLHICVGHPLLSFPKAGDFSFSSQDDPSELTAGAKDKEFSCLLVICLQPAPSTRSLFSWQLFLLSFSLVSFTLIYRGEFKKSGEAKDYLTQVQGPIDCGKLLAT

SEQ ID NO: 468 - protein, 91 aa, Homo sapiens
MFRSNPGFFFFCCCKSCILAISLGEIPRNEFTENMSLRESEDLKPDLSAFKSSALYTDVSSPVFFTYQNSRTLPEKPGRYCSTPVSCFSPG

SEQ ID NO: 469 - protein, 78 aa, Homo sapiens [sequence omitted]

SEQ ID NO: 470 - protein, 112 aa, Homo sapiens [sequence omitted]

SEQ ID NO: 471 - protein, 674 aa, Homo sapiens
MASAGVVSGKIIYEQEGVYIHSSCGKTNDQDGLISGILRVLEKDAEVIVDWRPLDDALDSSSILYARKDSSSVVEWTQAPKERGHRGSEHLNSYEAEWDMVNTVSFKRKPHTNGDAPSHRNGKSKWSFLFSLTDLKSIKQNKEGMGWSYLVFCLKDDVVLPALHFHQGDSKLLIESLEKYVVLCESPQDKRTLLVNCQNKSLSQSFENLLDEPAYGLIQKIKKDPYTATMIGFSKVTNYIFDSLRGSDPSTHQRPPSEMADFLSDAIPGLKINQQEEPGFEVITRIDLGERPVVQRREPVSLEEWTKKIDSEGRILNVDNMKQMIFRGGLSHALRKQAWKFLLGYFPWDSTKEERTQLQKQKTDEYFRMKLQWKSISQEQEKRNSRLRDYRSLIEKDVNRTDRTNKFYEGQDNPGLILLHDILMTYCMYDFDLGYVQGMSDLLSPLLYVMENEVDAFWCFASYMDQMHQNFEEQMQGMKTQLIQLSTLLRLLDSGFCSYLESQDSGYLYFCFRWLLIRFKREFSFLDILRLWEVMWTELPCTNFHLLLCCAILESEKQQIMEKHYGFNEILKHINELSMKIDVEDILCKAEAISLQMVKCKELPQAVCEILGLQGSEVTTPDSDVGEDENVVMTPCPTSAFQSNALPTLSASGARNDSPTQIPVSSDVCRLTPA

SEQ ID NO: 472 - protein, 114 aa, Homo sapiens [sequence omitted]

SEQ ID NO: 473 - DNA, 1404 bp, Homo sapiens
gctgagaaaggagggccgctgcaggcggggttcgaaccgtggggtctgggctgctcccgcggagggcctgggcggacgcgggatgctgggggtccgctgcctgctgcggtccgtgcgcttctgttcctccgcccccttccccaagcacaaaccttcagccaaactgagcgtgcgggacgctctcggggctcagaacgcgagtggggagcgcattaagatccagggatggattcgttctgtccgatcccagaaggaagtcttgttcctgcatgtaaatgatgggtcatctttggaaagccttcaggttgttgcagattcaggccttgacagtagagaattaacttttgggagttctgtggaagtacaagggcagctgataaaaagtccatccaaaaggcaaaatgtggaactgaaggcagaaaaaattaaagttattggaaattgtgatgccaaggatttccccatcaaatataaagagaggcatcctctggagtacctgcgacaatatcctcactttaggtgtaggactaacgttctgggttctatattgaggattcgcagtgaagcgacagctgctattcattctttctttaaggacagtggctttgtacatattcatactccaataatcacatccaatgactctgagggagctggagaactttttcaacttgaaccttcaggcaaacttaaggtacctgaggagaatttcttcaatgttcctgctttcttaactgtctcaggacaacttcatctagaagtgatgtcaggagcttttactcaagtgtttacctttggtccgaccttccgagctgaaaattctcagagccggaggcacctggcagagttttatatgatagaagcagagatttcttttgttgacagccttcaagatcttatgcaggttatagaggaactgttcaaggctacaacaatgatggttctctcaaaatgtcctgaagatgttgaactctgtcacaaattcatagcacctggccaaaaggacagattataacatatgctaaaaaacaactttttaatcatttcttatactgaagcagtggagatcttaaagcaagcatcccagaacttcacctttaccccagagtggggtgctgacctacggactgaacatgaaaagtacctggtgaagcactgtggcaacatacctgtcttcgttattaattatccattaacactcaagcctttctacatgagggataatgaagatggccctcaggaactagagggaagtgtagcttaacacagcctggggttgatgattctccttagtattgtagtcattggtcagccttaaatgttcatacttgtgcaaagtcattaatggataaatacagcatggtggctagtggcatagatttagagtcagagagacttgagttc

SEQ ID NO: 474 - DNA, 1345 bp, Homo sapiens
gagtggcgggggcatttgctggagactgagcctggcgcggaggctatgggcagccaggaggtgctgggccacgcggcccggctggcctcctccggtctcctcctgcagactaacgctgctttactcaaccaccctcttcctggccagagaggccttccgcagagcatgtctcagtgggggcacccagcgagactggagccagaccctcaacctgctgtggctaacagtccccctgggtgtgttttggtccttattcctgggctggatctggttgcagctgcttgaagtgcctgatcctaatgttgtccctcactatgcaactggagtggtgctgtttggtctctcggcagtggtggagcttctaggagagcccttttgggtcttggcacaagcacatatgtttgtgaagctcaaggtgattgcagagagcctgtcggtaattcttaagagcgttctgacagcttttctcgtgctgtggttgcctcactggggattgtacattttctctttggcccagcttttctataccacagttctggtgctctgctatgttatttatttcacaaagttactgggttccccagaatcaaccaagcttcaaactcttcctgtctccagaataacagatctgttacccaatattacaagaaatggagcgtttataaactggaaagaggctaaactgacttggagttttttcaaacagtctttcttgaaacagattttgacagaaggcgagcgatatgtgatgacatttttgaatgtattgaactttggtgatcagggtgtgtatgatatagtgaataatcttggctcccttgtggccagattaattttccagccaatagaggaaagtttttatatattttttgctaaggtgctggagaggggaaaggatgccacacttcagaagcaggaggacgttgctgtggctgctgcagtcttggagtccctgctcaagctggccctgctggccggcctgaccatcactgtttttggctttgcctattctcagctggctctggatatctacggagggaccatgcttagctcaggatccggtcctgttttgctgcgttcctactgtctctatgttctcctgcttgccatcaatggagtgacagagtgtttcacatttgctgccatgagcaaagaggaggtcgacaggtacaattttgtgatgctggccctgtcctcctcattcctggtgttatcctatctcttgacccgttggtgtggcagcgtgggcttcatcttggccaactgctttaacatgggcattcggatcacgcagagcctttgcttcatccaccgctactaccgaaggagcccccacaggcccctg

SEQ ID NO: 475 - DNA, 1381 bp, Homo sapiens
gcagggggagaacagcccacctcgtgactgggggctggcccagcccgccctatccctgggggagggggcgggacagggggagccctataattggacaagtctgggatccttgagtcctactcagccccagcggaggtgaaggacgtccttccccaggagccgactggccaatcacaggcaggaagatgaaggttctgtgggctgcgttgctggtcacattcctggcaggatgccaggccaaggtggagcaagcggtggagacagagccggagcccgagctgcgccagcagaccgagtggcagagcggccagcgctgggaactggcactgggtcgcttttgggattacctgcgctgggtgcagacactgtctgagcaggtgcaggaggagctgctcagctcccaggtcacccaggaactgagggcgctgatggacgagaccatgaaggagttgaaggcctacaaatcggaactggaggaacaactgaccccggtggcggaggagacgcgggcacggctgtccaaggagctgcaggcggcgcaggcccggctgggcgcggacatggaggacgtgtgcggccgcctcggtgcagtgaccgcggtgatggtgcaaggccatgctcggccagagcagccgaggagctgcgggtggcgcgtgcgccttccacctgcgcaagctggcgtaagcggctcgctccgctgatgcctatgacctgcagaagcgcctggcgagtgtaccaggcccgggccccgcgagggcgccgaggcggcggccgtcagcgcgcatccgccagcagcctggggccccctgggtggaacagggcccgcgtgcgggccgccaccttgtgggctccctgtgccgggcaagccgctacaggaagcgggcccaaggctgggggcgagcaggctgcgcgcgcggcactggatggagattgggcagcccggacccgcggtccgcctaggaccgagggtgataggagccaggtggcggggagggtggcgcccggggcccggccccccccaaaaaaagggctggagagcagcccagcagatacgcctgtgaggccagaggcctttcaaggcccggcctcaagaagctggtttcgagccccctggtgggaagacatgcagcggccagtgggcccgggctgggtggagaaggtgccaggcctgcctgtgggcacccagcgccgcccctgtgcccagccgacaattacttgaacgcccgaagcctgcagtcatgcgagcccacgccatctccgtgccttcctggctccgcgcagcctgcaagcgggagacccttgtctcccgcccccagtcgtactctgcgagttggacccctattttataaaagatcacccaagtttcacgccaaaaaaaaaa

SEQ ID NO: 476 - DNA, 4385 bp, Homo sapiens
agaaagtaacagtgacttctagatttctgggttgggtcatcttgttggatagtagtaccactgagatagggaattcaaggtttggggcaagggtaattggagatgagaattgtgtttggaggtaactactgacattcaagtggagagggttagttggcagttagttctatggtcatctcttttgccgagactgtatatttatcagactcctgggagaacaccaacatccatggggttgtagggaaggctaaggacaggagtggggagtggtaccttgaaaatccaaaagccatctcaagtaaaaggaataaatgtgtcatgctttttaaaaagttgatgtgcggaaaatgttttcttggcttggaaactgggcggcccaggggatgacagtatggacttccagtgaagtagtgacggaagcctgatcatagacattaaggaaagcggtgtaggtgttgtgagcttttgctgtaagaaaaagttgagacttttgttttgctttgtttgtgagagatgtgtatgtatttctgctgagtgataaagccagcggggagggactgatttttataggaaaggaggaaaaataatggaaacacatctcattattttattgtcacatttcttttctttgttatcttttgagtgtttcccttttttgccagtagagttattgtctattttttctttctataggacaaaaaaactaatacagactcctttatttttatatggatatactaggattgtaattcagatatttaatatcttttatcagtgttcagaatcatagattaatggagaaaacatttaaaattgttttaaatttaaatacattgaactctaacatagatgaaaaatgtgtttactgctttttatcaggtcgactgaaagcaacgtatggtaaatattgaaaactccaggcatcgaaaacaagagcagaagcaccttcagccacagccttataaaagggaaggtaaatggcataaatatggtcgcactaatggaagacaaatggcaaatcttgaaatagaattggggcaattaccttttgatcctcaatactgattcacaattgagttaaattagacaactgtaagagaaaaatttatgctttgtataatgtttggtattgaaactaatgaaattaccaagatgacaatgtcttttcttttgtttctaagtatcagtttgataactttatattattcctcagaagcattagttaaaagtctactaacctgcattttcctgtagtttagcttcgttgaattttttttgacactggaaatgttcaactgtagttttattaaggaagccaggcatgcaacagattttgtgcatgaaatgagacttcctttcagtgtaagagcttaaagcaagctcagtcatacatgacaaagtgtaattaacactgatgtttgtgttaaatttgcagcagagcttgagaaaagtacattgttctggaatttcatcattaacattttataatcttacactcacttcttgtctttttgtgggttcaagagccctctgacttgtgaagaatttgctgccctcttaagagcttgctgacttgttttcttgtgaaattttttgcacatctgaatatcgtggaagaaacaataaaactacaccatgaggaaaactaaaggtctttatttaaaatctggcattgtattaacatgtaattttatactatgtggtattttatacatttcctcagtagtgatatttggtaaagcagttcatacagcttttttctaagttccatgaatcttacccagtgtttaccgaagtatttaagcagcatctgaatatttccacccagcaatgttaatttatctaggaaagttcagaatttcatcttcatgttgaatttcccttttaacttccgttcatagacatatatgtgacttccaattcgaccctctggcaagtgagtgtggaagaaaacagcagttcttttataattgcttgaaattaggaaagcgcttatttcctcttccaaaatgctcgaaggtgatcaagtgaagtagggcaatgatgcatcatcatgaaactctctatgtaaccagtttaagggatttaggtaaaatacatctgcttcatcaagataatgactttttccagtcaggtctggcgggcactggagaaatctcatgggaagtgggcagtgaacatcgctgtaataatgagtagagtggcaacgcatcattataaatattgaagctgaagattaatcggggatgggtgaacaaactttttgaatatgactcatgacatcaagagtacctcgttgatgaactaaaccagtataaagggcgaggaacaaatttgataaaaacaggaaacttagagctggtttcttccatgttttcaggtgggttaatgagtatccacagaacaccatacagaatggtaaaactggataaataaacctgaattctttgtggctcaacatgctataaacaagcagtgtccacagcacagtcaccaaaagtatccggtatctctttggtgctagatagcagccatgaataaagaagggtaagtgagtacccaagataactggaaatccttgactgaagtaccagtgccatggatgagaaccataaaatgttccccagttctgcagcacgttaaatttcaaaaaattaaattgaaccagagtccattggccaaaaaaaaatacgatcaatcatcagagacaaactcaaagtaacaaagcctacaggtaaaaaatgatgtagaataagatcaagctttcttggttcttgacagaaatgtctgaagagcaaaggtgtccacagaatgacagctgtgggacgaattatgaaggcaagtgccaccagggatgagtatttgacactgttcatagactttgaaccttccaaaggatagtagaaaagagcaattatagtgagaacagtttccatggtgtttgtaagggttctggtacagcaataccatgtgaaccaggagcacaactggcaaaaaaacacccatcttgccacttcctgattttctagttgcttcattaatgagtaaagtctcacatctgctacagcagacagaagtgcttgggcaagtctaggaatccaaatcagcaactgaacactatctttccctaaaagatgaagaatcttgtaaatgcttgcaaagattaagggataagtgtaactcctcagtctctctgtccattcccaagtcaaataaccataattgaaaaccatgtgatgtgaaacttcaagagactgccagtattcatctggaacaaaacttgtctgcactaaaaagcagtttaatattcgtaaagctatggtaaacaagagcagataaatattttctccaagaagatccccgcggcgcctggcgctcttctcctgggtgttgaagtacaaggtagactttctctttcgcagctttatcttgccgtgggagcggttctggagaccatgcaaagtgaggctggcatctccgccccccggctccattccgcacttgcttaggggcctcctcatccctggccgccaccttcctaaggcggaagaaagctgcagtagcgcgctgctcgtccatccattaagtttggcctttgagagcagtcgtcgctcgcaagcccggaagtaaccgggaacgggcaacttcgtagctcccacccgacgtggtggcctccttgcggtttcctttcgccgtttccgaaccgagggattgctactcgcctttggcttggcggtctctgtgctcgggggtccgaaaactgctggaaggcccccggtctctggaggggagcaggcggtagcgagtttagtgacgtggagcaggcgcagaacagtcggagatttgaagagatttcctgggtgtggagtgtgactttccaaaaccagcttttccttgagctgtatttgttgcagcaatgtttaggagattgacttttgcacaactgctttttgccactgtccttggaattgctggaggagtatatatttttcaaccagtatttgaacagtatgccaaagatcagaaggaattaaaagaaaagatgcagttggtacaagaatcagaagagaagaaaagttaatactacatggagttaggcctggcacggtggctcacgcctgtaatcccagcactttgggaggccgaggcgggtggatcacgaggtcaggagttcaacaccagcctgaccaacatggtgaaaccctgtctgtactaaaaatgcaaaaattagccgggcatggtggcacatgcttgtaatcccagctactcgggaggctgaggcaggagaatcacttgaacccgggaggcggaggttgcagtgagccaagatcgtgccactgcactccagcctgggcgacagagcaagactccatctaaaaaaaaaa

SEQ ID NO: 477 - DNA, 1223 bp, Homo sapiens
tttcgtccgaaagatctccatctgcatgtcgctgctgggcttcctgctctcccgcctcgggctgctgctcaaggtgctgctggactggccagtggaggtgctgtacggggcggcggcgctgaacgggctattcggcggcttctccgccttctggtccggggtcatggcgctgggatcgctgggctcctccgagggccgccgctctgtgcgcctcatcctcattgacctgatgctgggcttggcggggttctgcgggagcatggcttccgggcatctcttcaagcagatggctgggcactctgggcagggcctgatactgacggcctgcagcgtgagctgtgcctcgtttgccctgctctacagccttttggtgctaaaggtccctgagtcggtggccaaacccagccaggagctccccgccgtggataccgtgtctggcacggttggcacataccgcactctggatcctgatcagttggaccaacagtatgcagtggggcaccctccatctcctggaaaagcaaaaccccataaaaccaccattgccttgctctttgtgggtgctatcatatatgacctggcggtggtgggcacagtggacgtgatccctctttttgtgctgagggagcctctcggttggaaccaagtgcaggtgggctatggtatggctgcagggtacaccatcttcatcaccagcttcctgggtgtcctggtcttctcccgctgctttcgggacaccaccatgatcatgattgggatggtctcctttgggtcaggagccctcctcttggcttttgtgaaagagacatacatgttctatattgctcgagccgtcatgctgtttgctctcatccccgtcacaaccatccgatcagctatgtccaaactcataaagggctcctcttatggaaaggtgttcgtcatactgcagctgtccttggctctgaccggcgtggtgacatccaccttgtacaacaagatctaccagctcaccatggacatgtttgggggctcctgctttgctctctcctcctttctctccttcctggccatcattccaattagcatcgtggcctataaacaagtcccattgtcaccatatggagacatcatagagaaatgaagatgcttacctgcaggaactgaaaacatcagccatggccaggcccccagaagacaaaagaagggaccagggaactggtgacctaagcaacccactgctt

SEQ ID NO: 478 - DNA, 884 bp, Homo sapiens
catgctgctgacgaattcggcacgagaccctgaagaggatgttcctgttcctgttcttcctggtggccatcctaccagtcaacactgaaggaggagagatcatatggggtacagagtccaaaccccactcccggccctacatggcattcataaagttttatgatagtaattcagaaccccatcactgtggcggtttcctggtggcaaaagacatcgtaatgacagcagctcactgtaatggaagaaatataaaagtaaccttaggtgctcacaatatcaagaaacaagaaaacacccaggttatctctgttgtaaaagccaaacctcacgagaactatgacagagattcacattttaatgacatcatgctcctgaagttggaacgcaaagctcaactcaatgggtgttgtgaagactattgcccttcctaggagccaggactgggtgaaacctgggcaggtgtgcacagtggcaggttggggacgcttggccaattgtacttcgtctaacacacttcaagaagtgaatctagaagttcagaaaggccagaagtgccaagacatgtccgaagactacaacgactccatccagctttgtgtgggaaaccccagccgaggggaaggctactggtaagggagacttcagggggtccctttgtgtggcgagggagtggccccagggcattgtcagttatcggcttgggtactgggacactttcttcgagtattcacccagaatctccacttttttaccggggatttagaaaaccaatgaaaggcctttcaacaatcctagaaccacaaaccctgtgtcttgcgcccaaggtccaccaaccctggggattgggtattttagggcctcaaaaaaaaaacccttgccccccg

SEQ ID NO: 479 - DNA, 4791 bp, Homo sapiens
  misc_feature (1)...(4791): n = a,t,c or g
ggggcagcagacgggagtttctcctcggggtcggagcaggaggcacgcggagtgtgaggccacgcatgagcggacgctaaccccctccccagccacaaagagtctacatgtctagggtctagacatgttcagctttgtggacctccggctcctgctcctcttaagcggccaccgccctcctgacgcacggccaagaggaaggccaagtcgagggccaagacgaagacatcccaccaatcacctgcgtacagaacggcctcaggtaccatgaccgagacgtgtggaaacccgagccctgccgtatctgcgtctgcgacaacggcaaggtgttgtgcgatgacgtgatctgtgacgaagaccaagaactgccccggcgccgaagtccccgagggcgagtgctgtcccgtctgccccgacggctcaagagtcacccaccgaccaaagaaaccaccgggcgtcgagggacccaagggagacactgggcccccgaggcccaagggggacccgcaggcccccctggccgagatggcatccctggacagcctggacttcccggaccccccggaccccccggacctcccggaccccctggcctcggagggaaacttttgctccccaagctgtcttatggctatgatgagaaatcaaccggaggaatttccgtgcctggccccatgggtccctctggtcctcgtggtctccctggcccccctggtgcacctggtccccaaggcttccaaggtccccctggtgagcctggcgagcctggagcttcaggtcccatgggtccccgaggtcccccaggtccccctggaaagaatggagatgatggggaagctggaaaacctggtcgtcctggtgagcgtgggcctcctgggcctcagggtgctcgaggattgcccggaacagctggcctccctggaatgaagggacacagaggtttcagtggtttggatggtgccaagggagatgctggtcctgctggtcctaagggtgagcctggcagccctggtgaaaatggagctcctggtcagatgggcccccgtggcctgcctggtgagagaggtcgccctggagcccctggccctgctggtgctcgtggaaatgatggtgctactggtgctgccgggccccctggtcccaccggccccgctggtcctcctggcttccctggtgctgttggtgctaagggtgaagctggtccccaagggccccgaggctctgaaggtccccagggtgtgcgtggtgagcctggcccccctggccctgctggtgctgctggccctgctggagacactggtgctaagggagagcctggtgctaaaggtgccaatggtgctcctggtattgctggtgctcctggcttccctggtgcccgaggcccctctggaccccagggccccggcggccctcctggtcccaagggtaacagcggtgaacctggtgctcctggcagcaaaggagacactggtgctaagggagagcctggccctgttggtgttcaaggaccccctggccctgctggagaggaaggaaagcgaggagctcgaggtgaacccggacccactggcctgcccggaccccctggcgagcgtggtggacctggtagccgtggtttccctggcgcagatggtgttgctggtcccaagggtcccgctggtgaacgtggttctcctggccctgctggccccaaaggatctcctggtgaagctggtcgtcccggtgaagctggtctgcctggtgccaagggtctgactggaagccctggcagcccttggtcctgatggcaaaactggccccccttggttcccgcccggtcaagatggtcgccccggacccccaggcccacctggtgcccgtggtcaggctggtgtgatgggattccctggacctaaaggtgctgctnggaaaagcccggcaaggctggagagcgaggttgttcccggaccccctgggcgctgtcggtcctgctggcaaagatggagaggctggagctcagggaccccctggccctgctggtcccgctggcgagagaggtgaacaaggccctgctggctcccccggattccagggtctccctggtcctgctggtcctccaggtgaagcaggcaaacctggtgaacagggtgttcctggagacctttgcgcccctggcccctctggagcaagaggcggagagaggtttccctggcgagcgtggtgtgcaaggtccccctggtcctgctggtccccgaggggccaacggtgctcccggcaacgatggtgctaagggtgatgctggtgcccctggagctcccggtagccagggcgcccctggccttcagggaatgcctggtgaacgtggtgcagctggtcttccagggcctaagggtgacagaggtgatgctggtcccaaaggtgctgatggctctcctggcaaagatggcgtccgtggtctgaccggccccattggtcctcctggccctgctggtgcccctggtgacaagggtgaaagtggtcccagcggccctgctggtcccactggagctcgtggtgcccccggagaccgtggtgagcctggtccccccggccctgctggctttgctggcccccctggtgctgacggccaacctggtgctaaaggcgaacctggtgatgctggtgctaaaggcgatgctggtccccctggccctgccgggacccgctggaccccctggccccattggtaatgttggtgctcctggagccaaaaggtgctcgccggcagcgcttggtcccccttggtgcttacttggtttcccttggtgctgctggccgagtcggtcctccttggcccctctggaaatgctggaccccctggccctcctggtcctgctggcaaagaaggcggcaaaggtccccgtggtgaaactggccctgctggacgtcctggtgaagttggtccccctggtccccctggccctgctggcgagaaaggatcccctggtgctgatggccctgctggcgctcctggcactcccgggccctcatagtattggctggacagcgtggtgtggtcggcctgcctggtcagagaggagagagaggcttccctggtcttcctggcccctctggtgaacctgggcaaacaaggtccctctggagcaagtggtgaacgtggtccccctggttcccatgggcccccctggattggctggaccccctgggtgaatctggacgtgagggggctcctggtgccgaaggttcccctggacgagacggttctcctggcgccaagggtgaccgtggtgagaccggccccgctggaccccctggtgctcctggtgctcctggtgcccctggccccgttggccctgctggcaagagtggtgatcgtggtgagactggtcctgctggtcccgccggtcctgtcggccctgttggcgcccgtggccccgccggaccccaaggcccccgtggtgacaagggtgagacaggcgaacagggcgacagaggcataaagggtcaccgtggcttctctggcctccagggtccccctgcccatcctggcatctcctggtgaacaaggtccctctggagcctctggtcctgctggtccccgaggtccccctggcttctgctggtgctcctggcaaagatggactcaacggtctccctggccccattgggccccctggtcctcgcggtcgcactggtgatgctggtcctgttggtccccccggccctcctggacctcctggtccccctggtcctcccagcgctggtttcgacttcagcttcctgccccagccacctcaagagaaggctcacgatggtggccgctactaccgggctgatgatgccaatgtggttcgtgaccgtgacctcgaggtggacaccaccctcaagagcctgagccagcagatcgagaacatccggagcccagagggcagccgcaagaaccccgcccgcacctgccgtgacctcaagatgtgccactctgactggaagagtggagagtactggattgaccccaaccaaggctgcaacctggatgccatcaaagtcttctgcaacatggagactggtgagacctgcgtgtaccccactcagcccagtgtggcccagaagaactggtacatcagcaagaaccccaaggacaagaggcatgtctggttcggcgagagcatgaccgatggattccagttcgagtatggcggccagggctccgaccctgccgatgtggccatccagctgaccttcctgcgcctgatgtccaccgaggcctcccagaacatcacctaccactgcaagaacagcgtggcctacatggaccagcagactggcaacctcaagaaggccctgctcctccagggctccaacgagatcgagatccgcgccgagggcaacagccgcttcacctacagcgtcactgtcgatggctgcacgagtcacaccggagcctggggcaagacagtgattgaatacaaaaccaccaagacctcccgcctgcccatcatcgatgtggcccccttggacgttggtgccccagaccaggaattcggcttcgacgttggccctgtctgcttcctgtaaactccctccatcccaacctggctccctcccacccaaccaactttccccccaacccggaaacagacaagcaacccaaactgaaccccctcaaaagccaaaaaatgggagacaatttcacatggactttggaaaatatttttttcctttgcattcatctctcaaacttagtttttatctttgaccaaccgaacatgaccaaaaaccaaaagtgcattcaaccttaccaaaaaaaaaaaa

SEQ ID NO: 480 - DNA, 3690 bp, Homo sapiens
gatataaaccaggcattcgagctggcaacggcaaccccatttgggttccctccctttgtatgggagctctgttttcactctattaaatcttggaactgcactcttctggtctgtgtttgttatggctcgagctgagctttcgctcaccgtccaccactgctgtttgccaccgttgcagacccatcgctgacttccacccctccagatatggcagggtgtccgctgcgtttctgatatagcaaggcgcccattgccgctcccaatcgggctaaaggctcgccattgttcctgcatggctaagtgcccgggttcgtcctaatccagctgaacactagtcagtgggttccacggttctcttccatgacccacggcttctaatagagctataacactcaccatgtggcccaaggttccattccttggaatgtgtgaggccaagaaccccaggtgagagaacaaaaggcttgccaccaccttgggagcagcccgccaccatcttgggagctctaagaacaaagacccgccgggccttagaactgatgacccagtactttaacaactggaactgggtctacaacaacataacagatcaggatgaaagcgaattgactgggttgttaggaaatactcaagaactcagcccagctctagaactcacctctgagcatgaaggcaatgttgggcacgctggtaaaggaccactagaatccagcagctcggacccctttctttgtgctcgggaaaaggggtgcaggactgctacatcgcccatctcagtggtcgcggaaggtgacgtggacacggaagtggtcgtcgtcgcggcaccggtgggagctaggcgcgaggctcggagtgcggccagcgggcggaggcggtctcgcatcggcggcgacggagggctcaggcgtcgtcgtttgggtggggggccgctgaactgacaagcgacatttcagctcctttcacccgccggaaccccggagccggggcccgctcagccggcgttaccatgaccaaggccggtagcaagggcgggaacctccgcgacaagctggacggcaacgaactggacctgagcctcagcgacctgaatgaggtcccggtgaaggagctggctgcccttccaaaggccaccatcctggatctgtcttgtaataaactgactactctaccgtcggatttctgtggcctcacacacctggtgaagctagacctgagtaagaacaagctgcagcagctgccagcagactttggccgtctggtcaacctccagcacctggatctcctcaacaacaagctggtcaccttgcctgtcagctttgctcagctcaagaacctgaagtggttggacctgaaggataaccccctggatcctgtcctggccaaggtggcaggtgactgcttggatgagaagcagtgtaagcagtgtgcaaacaaggtgttacagcacatgaaggccgtgcaggcagatcaggagcgggagaggcagcggcggctggaagtagaacgtgaggcagagaagaagcgtgaggctaagcagcgagctaaggaagctcaggagcgggaactgcggaagcgggagaaggcggaagagaaggagcgccggagaaaggagtatgatgccctcaaagcagccaagcgggagcaggagaagaaacctaagaaggaagcaaatcaggccccgaaatctaagtctggctcccgtccccgcaagccaccaccccggaagcacactcgttcctgggctgtgctgaagctgctgctgctgctgctgctatttggtgtggcgggaggggctggttgcttgtcgggtgacagagctgcagcagcagcccctctgcaccagcgtgaacaccatctatgacaatgcggtccagggtctacgccgccatgagatcctccagtgggtcctccagaccgactctcagcagtgagcttgtccccagcacctgctgcctcccagccttggagtttggattcctatggaattgggttctgctggacacaacctctttttagcatcagacctacctgccatcatcaaatggctgcagattggtacatgagacctcctctttgtaggacttcttcattccttagtcagggttccctgaaggaatgaggagaaatgggaggtggcgggggggcgtggggggcagttacctgcatgcctaaaggagtaggcttgggggtggggagagagaaaacatagccttttctagttgttatataaagctgtgtaaaggcaaggctcgtttctactaaatggtcagctgtcactacatttatacttttgtatgccacaaaccctttcattcctccctgggaatcagggtagatcaggaggaactgggggggactagaacaccacgctcagtaaatccagtctaaactgggaggtaggggtattcctgttttctttaggacctcagagatgtaagcattttagcagccacacaaaatctctggctatgaaagggacttcatgaccatccagtccaatataacacttgcagacagagaaactgaggtcttccatgacttgcctagtctcccagctagtttgaggcaaaactggattcccactctggtattctttcttccctttacatcattttccctcctttataatgtcctgagagaccagaactcacaccagaatcgattattcctcaggtgaagcatagactctttcatggtagacagatttcacgactcagagatagaaatctcttgctatcatcaggtcacgggcagctcctgtggagtcctgcccaacttatgtggcttccataaaatggcaacagtccaggctccttgcctaattttagagcattaactccctaattgccagtaagcaaggaggtggatctctgcaaacctacactgtctatgacagctctagttgtacttggtgtgactaaatacctcaaaggcaacctgcttctgcaggttttgaagtgtcagcttcataagacactgaggtttagaattgtttgattctagaccataactgaagggcataaatggaaacaggatatgaagggaaacaagtagcatcatggagctgaaaagtggtgcatcacccaatggctagcacaaacaaggatcacactgtccattctcttgtctgctaaattaagcattttcttgcctcctttgcttcatcttttcacaacagctggatagagggatcagaaatgactgtgtcatggtgctcattcactgcaaactcccagttgcaagctccttggctcccccggagggagcaagaatctcatagttcagagacacagagggccttttagccctaatgaccttttggatgggactgcaactcatgactatcctgatattggaagaaaggactttgttaatcttctcccccatagctctgctgcgtaggtctacatcttactcagaatcactacacattcctttagtcttcctccaagctccagagccattggtacaaatgctttattgaaactaaatacataatacacacaatgagatgaagacaatatagaagtccgcatagtcatcataatcccgttccttggccggttgaggcagctcagtggctgagcccagtcaagccaacccgcagcttcactcacgacttcaagatttgatgctaattcttttggatttctacagttattaaataagtgtctgagtggaaaaaaaaaa

SEQ ID NO: 481 - DNA, 886 bp, Homo sapiens
gtggactggattagctgcggagccctggaagctgcctgtccttctccctgtgcttaaccagaggtgcccatgggttggacaatgaggctggtcacagcagcactgttactgggtctcatgatggtggtcactggagacgaggatgagaacagcccgtgtgcccatgaggccctcttggacgaggacaccctcttttgccagggccttgaagttttctacccagagttggggaacattggctgcaaggttgttcctgattgtaacaactacagacagaagatcacctcctggatggagccgatagtcaagttcccgggggccgtggacggcgcaacctatatcctggtgatggtggatccagatgcccctagcagagcagaacccagacagagattctggagacattggctggtaacagatatcaagggcgccgacctgaaggaagggaagattcagggccaggagttatcagccctaccaggctccctcccccaccggcacacagtggccttccatcgctaccaagttctttgtctatcttcaggaagggaaaagtcatctctctccttcccaaggaaaacaaaactcgaggctcttggaaaatggacagatttctgaaccgtttccacctgggcgaacctgaagcaagcacccagttcatgacccagaactaccaggactcaccaaccctccaggctcccagagaaagggccagcgagcccaagcacaaaaaccaggcggagatagctgcctgctagatagccggctttgccatccgggcatgtggccacactgcccaccaccgacgatgtgggtatggaaccccctctggatacagaaccccttcttttccaaataaaaaaaaaatcatccaggaaaaaaaaaa

SEQ ID NO: 482 - DNA, 853 bp, Homo sapiens
ctcccttcccgctgtgtggctccagcaagtttcctcccacctcaggtttgggtttccaggcattaagtgacaaagtggatgcgacgctccttctggactgtaatgcgcactgcgtggagatgttcgtgttccagtgtagacagggcgttgtcacatcaggcaggactacagggacaatgtttgtcagcctgtcttctgggcaacttggggtatcctccctttatatcacctcctgcccaggtgctctgcgccgccagagcatcatgtcatttgggatccctgatggcacattttgagactttggttcacagtaaagattggtcctgtgtgatcttaaagtaatgtggcttaaaaacaaatggctgtcagggaattgtaaatcaaagcaaacaccgatgagaatggcccaaatccaggacactcagcaccaaatgcgagggaggatgtgaagccacaggaagcctcactcactgctggagggaacgcaaaacaggacagccaccttggaagacagtttgacaaatccttagaaagctaaacacacttttaccctgggatccaacaatcatgctccttgatatttacccagaggagttaaaaaaacttatggccacactaaatacctgcacatgggggtaaataagagactttatttaggataattcataaacagctggatccttaaaggcaaacaaaagttttactcttcgcaaccaaaaaccaaaaacttaccgtggggtgccccccaaacagttggaaaatttttaccccgccccttaaaaaaacagacgcccgcgattgattcccaatgaaaatgtatcttcgcggaaactttttttcacgactcgggagc

SEQ ID NO: 483 - DNA, 1756 bp, Homo sapiens
caagagtgacactggatatactccagaagttggacccaccacagcctgcacactggacttcttggcttttatgagctattcaagagatatttagtcatcacgttgtgtcacaatgggagtgactcacagagcaaggagagaacctgaggattcctcacacatgtagtactcagagctctacggaaacccaggcacctcgacctcaagaggatcagcctggccagggtggcacaactcttccttccccgtgcacagcaggaaagctgccatcagctgagcaagtccaccaacagtttctgtgtcccacttcatctttaataaggacaccatcttcttgtattatacaagaaaggagtgtacctatcacacacagggggaaaaatgctcttttgggtgctaggcctcctaatcctctgtggttttctgtggactcgtaaaggaaaactaaagattgaagacatcactgataagtacatttttatcactggatgtgactcgggctttggaaacttggcagccagaacttttgataaaaagggatttcatgtaatcgctgcctgtctgactgaatcaggatcaacagctttaaaggcagaaacctcagagagacttcgtactgtgcttctggatgtgaccgacccagagaatgtcaagaggactgcccagtgggtgaagaaccaagttggggagaaaggtctctggggtctgatcaataatgctggtgttcccggcgtgctggctcccactgactggctgacactagaggactacagagaacctattgaagtgaacctgtttggactcatcagtgtgacactaaatatgcttcctttggtcaagaaagctcaagggagagttattaatgtctccagtgttggaggtcgccttgcaatcgttggagggggctatactccatccaaatatgcagtggaaggtttcaatgacagcttaagacgggacatgaaagcttttggtgtgcacgtctcatgcattgaaccaggattgttcaaaacaaacttggcagatccagtaaaggtaattgaaaaaaaactcgccatttgggagcagctgtctccagacatcaaacaacaatatggagaaggttacattgaaaaaagtctagacaaactgaaaggcaataaatcctatgtgaacatggacctctctccggtggtagagtgcatggaccacgctctaacaagtctcttccctaagactcattatgccgctggaaaagatgccaaaattttctggatacctctgtctcacatgccagcagctttgcaagactttttattgttgaaacagaaagcaagagctggctaatcccaaggcagtgtgactcagctaaccacaaatgtctcctccaggctatgaaattggccgatttcaagaacacatctccttttcaaccccattccttatctgctccaacctcggactccatttagatcgtgcttatttggattgcaaaagggagtcccaccatcgctggtggtatcccagggtccctgctcaagttttctttgaaaaggagggctggaatggtacatccacataggcaagtcctgccctgtatttaggctttgcctgcttggtgtgatgtaagggaaattgaaagacttgcccattcaaaatgatctttaccgtggcctgccccatgcttatggtccccagcatttacagtaacttgtgaatgttaagtatcatctcttatctaaatattaaaagataagtcaaacattaaaaaaaaaaa

SEQ ID NO: 484 - DNA, 894 bp, Homo sapiens
ttttttttttttctgattgacaatgagaatatttattgagggtttattgagtgcagggagaagggcttgatgccttggggtgggaggagagacccctcccctgggatcctgcagctctagtctcccgtggtggggggtgagggttgagaacctatgaacattctgtaggggccactgtcttctccacggtgctcccttcatgcgtgacctggcagctgtagcttttgtgggacttccactgctcaggcgtcaggctcaggtagctgctggccgcgtacttgttgttgctttgtttggagggtgtggtggtctccactcccgccttgacggggctgctatctgccttccaggccactgtcacggctcccgggtagaagtcacttatgagacacaccagtgtggccttgttggcttgaagctcctcagaggagggcgggaacagagtgaccgagggggcagccttgggctgacttaggacggtcagcttggtccctccgccgaacacccaagtgccactacctgcatatgagcacacagtaataatcagattcatcatctgcctgggcccccgtgatcgtgagggcagctttgctcccaaggatggatccagagaagcgaccagggaccccagaagagcgagtgtttgtgctgtagatgagagtacgtggagcctggcctggggtctgctggtaccagctggggtaaaaactagtggagactgagccagatgtcaagccacaagtgagagtgactgtccctccaggggacactgagagcgatggctcttgtgtcaccacagtctgagattccactcctgatccataagcaaggagtccgaggagaagcatcatccaggccatggtggggacactcatgaaggcgaaggaattccac

SEQ ID NO: 485 - DNA, 6087 bp, Homo sapiens
  misc_feature (1)...(6087): n = a,t,c or g
aaaaaaagcataacatatccccattgtaacatttggaaactaggaaaatggaaaggagcaaaagcaaaaattctttgaatagtacctcaacccaaagccttctttcttggcacggtagtgtatttctttccatttcgttctccacagtcattatatatgtataagattaatttcattttattttatttattttcagacctgttcaacaggaagtaagattaattttaaaccctgcttttttgaccaagcttctcacctaagcaccactgaatggcagcatggaattccctccacgccatccatgcagctggtcccttagctccagtctctgacttgccatgtctctttgtcctccccgacaggacatgaaaccaaggctctgctgaacaacagtgggccccgctacaagcgcagcaagctggagaggcagatgaactgcgacgtgctctggtgtgtcctgctccttgtttgcatgtctctgttttcagcagtcggacatggactgtggatatggcggtatcaagagaagaagtcattattttatgtccccaagtctgatggaagctccttatccccagtcacagctgcagtttactcatttttaacaatgataatagttctgcaggttttgatcccaatttccttatacgtttccattgaaattgttaaagcatgccaagtgtacttcattaaccaggacatgcagttgtatgacgaagaaacagactcgcagctgcagtgccgagctctgaacatcacggaagacttaggacagatacagtacattttctcagataaaactggcactttgacagagaataagatggttttccgaagatgcactgtgtctggtgtagaatattctcatgatgcaaatgcgcagcgtctggccaggtaccaagaggcagactcggaggaggaggaggtggtgcccagagggggctcggtgtcccagcgcggcagcatcggcagccaccagagtgtccgggtggtgcacagaacccagagcaccaagtcccaccggcgcacgggcagccgggccgaggccaagagggccagcatgctgtccaagcacacggccttcagcagccccatggagaaggatatcacgcccgacccaaagctgctggagaaggtgagtgagtgtgacaagagcctagccgtggcgaggcatcaggagcacctgctggcccacctctcgcccgagctgtctgacgtctttgatttcttgatcgcactcaccatctgcaacacagtcgtcgtcacgtccccggatcagccacgaacaaaggtgagggtgaggtttgagctgaagtccccggtgaagacgatagaagacttcctgcggaggttcacacccagctgcctgacctcaggctgcagcagcatcgggagcctggccgccaacaagtccagccacaagttgggctccagcttcccgtccaccccgtccagcgacggcatgcttctcaggctggaggagaggctgggccagcccacctcggccatcgccagcaacggctacagcagccaggcggacaactgggcctcggagcttgctcaggagcaggagtcagagcgcgagctgcggtacgaggcggagagcccggatgaggccgcactggtgtatgcggccagagcctacaactgcgtgcttgtggagcggctgcacgaccaagtgtcagtggagctgccccacctgggcaggctcaccttcgagctcctgcacacactgggtttcgattccgtccgcaagaggatgtcagtggtgatccggcacccgcttaccgatgagatcaacgtctacaccaagggggccgactcagtggtcatggatctcctgcagccctgctcttcagttgacgccagagggaggcatcaaaaaaagattcggagcaaaactcagaattacctcaacgtgtatgcggcggaaggcctgcgcaccttgtgcatcgccaagagagttctgagtaaagaagagtatgcctgctggttgcaaagccacctagaagccgaatcctccctggaaaacagcgaggagctcctcttccagtctgccattcgcctggagaccaacctgcacttgttaggtgccactgggattgaagaccgcctgcaggacggagtccctgaaactatttctaaattgcgtcaagcgggcctgcagatttgggttctcactggtgacaaacaagaaacagctgtcaacattgcatatgcctgcaaactgctggaccacgacgaggaggtcatcaccctgaatgccacctcccaggaggcgtgtgcagccctgctagaccagtgcctatgctacgtgcagtccagaggcccccagagagcccctgagaagaccaagggcaaagtgagcatgaggttctcctctctctgcccaccctccacgtccactgcctctggccgcagacccagcctcgtgatcgatgggagaagcatggcctacgctctcgagaaaaacctggaggacaaattcctcttccttgccaagcagtgccgctccgtcctctgctgtcggtcgacgcctctgcagaagagcatggtggtgaagctggtgcggagcaagctcaaggccatgaccctggccataggtgatggagccaatgatgtcagcatgatccaggtggcagatgtgggtgtgggaatctccggccaggagggtatgcaggcagtgatggccagcgactttgcagtgccgaaattccgatacctggagaggctcttgattcttcacgggcattggtgctactcccgacttgccaacatggtgctgtacttcttctacaaaaacacaatgttcgtgggcctcctgttttggttccagtttttctgtggcttctctgcatctaccatgattgaccagtggtatctaatcttctttaatctgctcttctcgtcacttcccccgctcgtgactggggtgctggacagggatgtgccagccaatgtgctgctgaccaacccgcagctctacaagagtggccagaacatggaggaataccggccacgaacgttctggtttaacatggccgacgccgccttccagagcctggtttgcttttccattccttacctggcctactatgactcgaacgtggacctgtttacctgggggacccctattgtgacaatcgcgctgctcactttcctgctccacctgggcattgaaaccaaaacctggacctggctcaactggataacgtgtggcttcagtgtccttttgtttttcaccgtggctttgatttacaatgcgtcttgtgccacgtgctatcctccgtccaacccttactggactatgcaagccttactgggtgacccagtgttttacttgacttgcctgatgacgcctgtcgctgcactgctgcccagattgtttttcagatccctccaggggagggttttccccacacaacttcagctggcacgtcagttgaccaggaagtcccccaggagatgcagtgctcccaaagagacctttgctcagggacgcccttncgaaggactcgggaaccgaggcactcatcagggaggacagtcaagacctctgtgcccctgtcccagccttcttggcacacacagcagccggtctgctccctggaggccagcggggagcccagcacagtggacatgagcatgccagtgagggagcacaccccctgctaaggggctgagcgcaccgggccccaatgtcctctgcgccaggggaggctgtcctgaggagtccaggagggtgtcctgaggagtccaaggtgagagctgccagcaccggcagggtgacccccctgtcttccctcttcagcctgcctaccttcagcttactcaactggatttcctcctggtcgctggtcagcaggctggggagtgtcttacagttctcccggacggagcagcttgcagatggacaagcgggacgtggacttcctgtccagccccactcaggccgatcaggacttcaagggccagaccacagactacttataggagcatcttcaaggcggtcacagtgaaaaccttgaaatggccttttttaatatatataaataaatgttaatattatttatgtttattatttgcacagaagagttctagggagatgtatttctaaatgtttcccaggctaatacaggaaacaagaggtaccaaaaaagaaagtttattttttaaaattctaagtagagtatattgaaaagaaaaagaagagccttaacatatataaaagtttaaagaagagtaacacttgaaaagtgtgtttagatttattttttcatctcatttttaagaacaagcagtacgatttgttttcttcaacatgtgtgactgcgcactgagtacaaatgtgtgactgctcatggttaatgcaggcaggtgtgaacatgggggaacaatgagcagagatggcagagggcagagcacatggcccccagaggcttccagtctcactgacacaggagggctgggctccacttcatccagatgaaggaaaggaagacctcaagaaaaattcacagttgagtgcatcccagcattctgttccgggcaggcatttcaggaagaccgccttgtaggtattacatccctggtgtcgtattttgcctgttaaatcgtaacaagcaataaacaactttcactttgcaaagacagtgtgtccagttaccactggtgtatgaaatgattaatacctgacctcacagagtatgatctgagggcacttccgtaaggcaagtccttttagaggctatgaagaaaacagctgcatggcacataccaaagctgctgcacagccggccaccatggcaccctgcaccaggccatcagcaccacgtgccaaggagctcagcggtcttcaggcatttttgtaatgagccattagttctgtccctctaaaactagaaaaggaagggcaggaaatgataacaacccaaggcaatgatatggcatgtcatcttctgagcccttctttctactttgtcaaacagttcttagttgctggctctgctcggcaccggggctgtgaagggtgtactccctgctgtgtgggagggacctagggcctctttggatgctgtcttcgaggacagcaatgcagagagggcataggatctgaggacaaggaaattcctcagcatggcgtatcaggaaagcatggctcattctgcaatgagccatgagtgtgggccatcgcaagtcacagaaattgcacctcattccagtcaagcagaaaaacaggcacaggctcagtgtaggtcccaagagagggtgcctggactcagcaactcggacctgggcttttctcccagctttcagggacagctttgtcctgagtctgcctctgttcacggggatgcttggctggagtcacccccaggacttatccatgcatcactattcagaagacacagagggcccctctctccacattccaaacagagtcctggtttcctcagcctcaccctgcatagcttgcacaacatcctcagaaccattcactggcaaatggaggggaacgtgctgactgggactcccagctggagctgggaggagaggtccacttcccttagaacacctgagctgctgcatgagtggacgtcagaagaatctctatgccctgttaaatggggagacaaaggggtggtgggggcttcagccagtgatttcggaccgaaggtgacagccgtcccaaccctgcccagcctgatgccacctcctctgttcttggaacaacgcataggaaaagaatctcctttggaaggtgacactgctccctgaattaaggtaatggttgcgagcaccaagtacaaggactagacgcatatttacctgcgtatctgagagttccagattcccagcttccagatgatccttgcacagacaacctaccttctttccagaggatgtctttctcctctggagagtagatgcttgctcttgggaaacggaatgaccttggcgctggcttcaggaatatgcatcccacagccagtttagagaaatacatgttgtaaatggcattgacagctgctctttaggatggggagtattatggaaatccacaataacaatctatggcaagcaact

SEQ ID NO: 486 - DNA, 7705 bp, Homo sapiens
ttttttttttttgtaagaaatctgattattcaaatttattaccatcaagaattatgcaatgatgctgtagtttttcttaacaaatagaaaacagactgtgtacaacagtgaactctacagcactagcacccacaaggtaaaaatgaatgtttcatcatccaacattaccaaccctggaatgttgatcttgacttagcctagctaggtttggggacgtcggcaccacgtccctcagctaaaacagctatgcacccttccccgcccccacttacctatctagatagcgctgcccagaggaagaggcgctctccctgcccctcagcaagctgggataataaggactgattagagtaccattgatagaagtccagtagtcttgccacattggtttatgagggcatcttggagtggaaaagagcgattatcgggggctttgaaaacagctgcaaaccagggaggaaaatcatctggcccctgctctgaggacagacatgtgctaccaggcccactggcctggacctgaaaggccagccacgcccccgcttggccctgaggtgcatggggtgtggcacacaccctaacctgtgctattcaccttggccacacagccagaccccacagcctacaaacaccacaccatactgcaatgctggggaccaaagccaggctctgtgggcccaggtcagccagcagctccctcgggaaccccaggcacacggagttgcttcccctcttgagggtttgaagcagaagccaagggctgactctttttttttttcttgggttttttgttttttttgttttttatttttgtggttttttgtttttgttttaacctttgcaaacacgatggtgatgaggaatgccttgccaggctctcccagacacatctgtggttctgggctgtgaatgttaaacacacactgggatagacgaccagggatgagtgttccctatcttctccccgcccaccactgtcaatgtggcctaaaaaaaggctttaaagggaaaacaaaacttaaaaaaacattgagtttccctgcatttagctgaaacaggatctcgtctgaagggctggaggagcagccggatcagcactgcctcccggcccacggccgagcctccgctcaggctggcagccccagctttgcacgaggaaggcaatgttctgtccttcagcagaagtcatacaaaataaggatccaaagtgaactcaagaaaaaaaaaaacaaaacaaaataaaccccaacccctacagtggcccattctgcagatacggattcgcgaaaggaaaaatcagagggaagaggctaaaatccctcagtctaccccacttaatgtattaaaaaggaggctttgccccaaccccaccccatgagaagaagcatgagaaatgcgggagcgcaacagagagcttgaagcgggctccaggtgggtctggtggacagaagggccacagtgcctgcctgctgggccatccacttgcccagggatgttctaggctctctgattggtgtggcaacgttcctgaaacgctgtgatccccgtgggctgtgctctgccagtgacagcatctgcgtaggagggctggacgatggtcggtatggctcagaggagctgggtcccctccggagccccacggcgggggtggcggaggagaggggagcggtagttacgttgcatagtggtcaaagctgccgaggtactccagggccgcacggtagcacagctgatactggtcctctgtctgcaccatggcaggacgctgtgtacgcagggtcttcacggtctgaaacatgtcgaccacgccctcatagcgcatgcgctccaggacgatgctcagagtgatgaacaccccggtgcggcccacgccagcactgcagtgcaccgtgataggcccatcctgtccaaactgctccttggtcttatgcacctgcccgatgaagtcaatgaatccctcgcctgtcttgggcacgccctgctctggccagtctgtgaactggaactgccggattgtccttgactgcccatcccgggcatccgtgaccttgaactcacgcaggatatactggggcatgttgtactcagccatcgggtcaacaacaaagtactggtagcgagcagagcgctctgctggccagtactggtggcatttctccctgcccatctcccgaagcttggtcagcatgacgatgatggtggaattgtgctcccatagcatgcgccagaagtcctcggtgctctctgccagaggcccctgtgtagctatgtaggccttctgctgtctataaccatccaggaagctggcattgatgtagtcagagccctccacaccacggatgggctgcagacacacacgggtcaattcgtagggcatgatgttcaccagccggttcttgaacttgttgcagggcaggttggcgctgatgaagcgggacgtgtgggccttggagctggccagcaacttgaactcgagctccatggcggtcacactctcccctggaggcacttggcccagcttctggatgtgggcatacaggttgcgggcaggcacctctgtgtggccgcacgtggcagcctccagcagcgcctcatggatgaacacgtactggtcctccgtctgcaccatgtagttcctctgtgatcgcatgcaggtcacgtggccatagatgtccaccgtcttctcgtgcttcatccgctccaacatggcatcaatcacgatgaagcagccggtgcggcccacgcccgcgctgcagtgcaccaccatgggccctgcgtctagggggttgcaggccttgacccgtcgtaggaaggccaggatgggagttgggtactcaggaactccatggtctggccaggccatgaactgaaactgacgcagctcacgcttctcactggagccactcttgtggagtgcgaaggtgcgcacagtgtatgtggccagctccactgtgtccaacagggtcacctgaataaggccacaggtctcggtgccacgggctggccagtactgatcacattttacccgggacttctcctccagccgtgtcatcatgaccacagtggccgtgcgctgttcccacaccatcctccagaaatcgcccatggtctcgggcagggggccctgcgtggcgatgtaggcattctgcttgcggtagccatcgatgtagttggcattgatgtagtcactcccggggacgccatcgatagaggtaaggatgactcgagagtggtcgtaggcgatgacattcgcatagcggttcttgggcttgttcacctccaggtttgaattctcccacgtgaactgctgtccagggtcgatggactcatactcctgggagaacttgaggccatcgttggctttgaggcgctcgatgttgtccgccaggtcggtgatggggatgggtgggtggtctcgcatacctggggtctggtagttgagcctccgcatctccacagggtcagaggagtgggccagcaaggagtccttcagtccgatcgactgctcatccttagaggacggagagtgggtccttttccttttgaacaagaggatggcgatgacaatgaggatgatgaggatgactgccagcacgggacccgtcacccacagcatctccggctcctcctgctgctgggctggtgtcacctggaccacgatctcatccgagtaggggctggaggcatagcgcttctggtccatgggttccttcaaggaggcaagcacaaagcactggtagctcaagtccggagacaggggccggttgtagaagccccggtagttcttcttgtcccccaaggtaaaggtctccgggagcacatccagttgagcagccacatatggcttcagacgttctgcctgccgccgccgccgccgctgctcctctccgccttgctcgatggcttctagaagctcgtccagctccagttcctcgggtgtgctccaccttggcgtcagcatgctcccgcccacacggtcaatgggtaccacaacaatgtagaaccacctgacaagcgaggggtcttgcacatggggcatggagagatcgaagcggccgtcctctatgtaggcagaggcaggcagcggcttgtgaggcaggaggtcgggggctgtgcggatggacaccaggtgctgcaggccccctgcgctgctgccacggttcatcagcacaaacgagtactctgtgttgggctgcaggtctgcgatcagcttccgcatcgagtgcccgtccacctccacactctgcccattgtacagaatcttaaagggcacagctgacttataggagtcgggaacctcccagctgagcagcacagacgtcttcattgcagccgccacccggaagttcttggcaaacacttgctccaccggcatggtccgggactggatgctggggctgagtgggccagagcctttgctggtccatgcgcggaccttgatgtcgtaagtggtgtctggcttgaggccagtaagggtaaagcgggtgtctgtcgtgatgttctgcagctcctgttggctgttgatgtctcggaacaccacggtgtagctgatgatgcgcccgttcctctccgccagcactggcgggtcccaggccagttctgtggtagacgtggtcagtcctgtcacatgcaggttttgggggaagccgctgggcaggtcctcgggggtcctgatctccttctcgaactcctcacccaagccagcccggttcttggcagcaagccggaagatgtaggtggtccccttgtgcaggccggtgactgtgaagtgctggtcatccttgccgaaatctatggtgttgggccgcgcctcgtcggcccggcagtactgcagccggtagcccagcagctcgccaggcagttccttgggtgggtgccactggagcagccgcagtgttcatggccgtggtgctgatcatcatggtgggccggcctgggactgcacctgttgtagtgacaattttgggcttgctgcgggcaccatcccccttggtggtataggcagcaacagtaacggagtaggtggtctccggggtcaggccgctgatagtggtttcatagtcctcggactcctctggccgccactgggcctcggctagcatgacgtcttggatgatggggagtccacggggctcgccattctccagccgcacgtaggtgacctggtagccgcggatctggccatgctgcttgctggggacaggcagcttccagtagacatgcacagcagtggagttcagtggctccacctccaccttccgcggaggcccgctgggcacgtcctcatcggtgcgcaccagcaccgggctgctctcggggccggggcccacgtctgtgtgtgcccgcacccacacccggtactccgtccacttctccaggcccaccaggtcccagctggagtgctcacggctgatgccatccaccacatgccgcccgcggtcctcgccgtccaccgcctcgtaggccacggagtactgggtgataacgccgttgcggctgtcggcaggcggcgggacccaacttacccggaccgtggtggagcccatgctcacacacatcaccttctggggaggggcggagggggtggactgggctgtgcgggcctcaatggtgggggtgaagacgcccacccccatatccgagcgtgcagccagctggaagcggtagagtgtgtcaggcttcaggtcctctagtgtgtaggaggaggttgggtcgaaggtgaccttgtgctgttggtcttcgtcctctgccgcccagtacaccagttcatacatgatgatccgctcctgagggggcagcagccacgagagctggatcctggtgtccgactccacctcggcctggaagtccgcgggctgggcaggcactccctgctgcgtcttgacctggatggtggggctgggagggccatcgcccacggcggtgaaggcaagcacgcgcaggctgtaggtgatgccaggcagcaggctgcccacggtcgtgaggagccccgcgtcggtgttgtgcttgtgccaggcgttcggggggcggcgggagtccggagtatagtagacgcggtatccccgcaccaggccgttgggctcctcgggaggctcccactgcaccagcatggtgctggcgctcagcatgcgtgcctgcacgcggcgcggtgggctggagggcgcctgttctcccgtgcgtgcccgcactgcctcgctgggcggccctcgcccgatgctgttcaccgccagcacgcggaaggcatattccgagaaagggctgaggccgccaatgctgtagcgggtggtggccaccccatccacctcctgaaaggggccctccgtgcccgctgcgcggtactggatgccatagtaggttacaggctccgagttcccagagtcccaggtgagggtgacactggtggcagttgtctctgtcaccacaagatcaatcggaggctttggaagagctttcactgtgacctgggctgtggcctcgatcatgcccagcgaggagatggccacacaggtgtagttggcagagcgtacgacattgctgagctccaggacgttgcggccaactggcatctcatcctccttggtgagctcctcggcccccatcatccacttcacgtagggcatgggtgcacccactgccacgcatgtcaggttcacgctgccgcctggcatcacctcctggctgctgggagggatggagaaacgaggagccacgcggcgcactcgcacatacaggttcgcaggggctgagtaacgtgtgcctgccgagttggtcgccacacactcgtacttgccttggtcggattcctcactgctctctatctgcaaggcacctgaacgcagctgcttgatgcggccgttgctcgtggcagggtctacaggaaggaagtccttgaaccaagaaatctcagggtctggatttccgcctgcggcacatagcatggtggctgtgcgtgccttctccaccaccttcagctgaggccccatgtcgatggaagggaacccagggggcagctgttcctcttcgagcactgagagcttggcactagtgttgatctcacccaggctgttagtagctgtacactcatagatggcttcatctcgctgcacccgcaatggctggatccgaagcactgaccctgccccatcatcaaactcaatgacctcgaagcgctgggagctgactttcttccccttcttcatccatgtgatgcgcggcttgggttctcctgtagcttggcacacgaaggaggctacccctcctgacagcccagtctggtcctcagggactttaatgaagacaggtttgctgtcaccatgggcgcctgccaccaaaccaagcatcaccagtgcaggcacaaggggcaccatcgtcctccctggggctggctcaggggccatccagggctctagctccacagccagccacagcccaggacaatcaaccgagtctttgcttcttcaccccggtcactcttgctggatactcagcaccaagggccgggcaccagggcctccactccttccttcaatactgcccgtctcaggcagtggcatcttcagcaatttaatcactgacatgcagagaccttccctcctgcaccactgtccaatcagtcatcaatcctctcctccttccgctctgtctcccctgtgctcagggtgctccggcgcctccaggctttgctctctattccccgtccacgaaa

SEQ ID NO: 487 - DNA, 1309 bp, Homo sapiens
cgacccacgcgtccgatgtcattactatatttcaatgcatcatgcttgtaactggcatttcatttataataagaatgagttattcatttgtaagccgttcagtaatttatctactattcctaaattggcataatgttagataatctattttgaatcacctttaattacatgtcagaatgccttaactaccctaacttgacaaaacagaattctttggtagacgcggtgggggcggggtggggggtctggacggagtctctatttaaggagaaatcatcatgctatgataaaacacagaagcatgagtggcaagtggcggggtatttattttgcacaaactatttgcagtctctgtgtatttaaaaagtaaagaaagttgcatccagaagggttttgttagaatgaatacatttatattaggactgacaacttcagctcttttgtttaggttttcaattatttttggtaagagtatgtagccttatgatctggatatattttgcattcattttccaacgcctacatttaattcctggtaagagcagtgctcgtcaagtttctggtttttctctgctctcatttaacccgtcaaacacaatctttgtaaagctagattggtggtgttttatacaacttatttactcagcttacctttttgagaaacgattgttagaaattgacgatgtgtttgttccagtgatactgaaagtagtgggggcaagaattgagtttcacagtggaattggctttggatctggcctatagattagtgacataaaatattttctctattttcccctgttctttttgtgttatgcacttaattttatgactgccgggggggtcagctggagtgctgcttaacaagtatctctcctactctcagtggtcagaggctgtgttggacccatagtagaattttccaggtcacagacccaagcttccatgggttgttactgtgctgtaccacttggtgggtctgattctgaacctgatgtgtgtgttaattatattttaagcaacacacacacacacacacgcctcatgtaatggacttttataacaaaagaaaaaatttggatttctaatttacaaatggcaaattatttatccctctctggatgcaccaaagaccagtaaagtttatagcttttccatctatatttataaagcaatactgtattataaaaatcaatatttttatcacatgcttgaaatttttattttgttgttttaaaatgtgcactctaaacatatcagaaccttatttcttcctatgaacttaagctgcctgcgcacaaaaaaaaaa

SEQ ID NO: 488 - DNA, 1130 bp, Homo sapiens
tttcgtctggcggccgggtaagggtctgagtggatctcctgccaggccagagcgccttcgggggccgcggcggaaggccaggagtttgcagccagggcgccgggtttgtggtctgcagtgtcgtgaggctgaggtgcagcatgtctagactgggagccctgggtggtgcccgtgccgggctgggactgttgctgggtaccgccgccggccttggattcctgtgcctcctttacagccagcgatggaaacggacccagcgtcatggccgcagccagagcctgcccaactccctggactatacgcagacttcagatcccggacgccacgtgatgctcctgcgggctgtcccaggtggggctggagatgcctcagtgctgcccagccttccacgggaaggacaggagaaggtgctggaccgcctggactttgtgctgaccagccttgtggcgctgcggcgggaggtggaggagctgagaagcagcctgcgagggcttgcgggggagattgttggggaggtccgatgccacatggaagagaaccagagagtggctcggcggcgaaggtttccgtttgtccgggagaggagtgactccactggctccagctctgtctacttcacggcctcctcgggagccacgttcacagatgctgagagtgaaggggggtgagttgtctctcttggaggcagttatggctacagccaggttgtgttttgtaaaagtattatcaatggaaaattcaaaccaagctgctgcaaatgatttttggaacaggtaagagtataataaatacagaagagttgaaacaaaaaacccatccaatttatgtcattcagacaaatgtagatgttaatagcagttattgcttgcatctgttatcttagtttattacatagttatgatatattatttgggcatttttctgtgttatcacaaggacttgataagcattgtttgactttgttcctttccttgggtggctgagctggtatacggagatgtctaagcacgaagcatgctcctccctgggagtcaccctcttcccacaggggagccttgcctgtgatcctttgcatttttacaggtgggaggtggatgtcctgagttctcagtggcccaggagggctgacg

SEQ ID NO: 489 - DNA, 514 bp, Homo sapiens
ggcacgagaactggcttgtacatagaagacgtcacacagttttttcttccttgcattttctctcttatttctcaccctcacttcaaattgtttaagtagtgaaattcttttgcctatttcacctaaaactgagatgaagaggaatgagggagaatggtaataattaactgttctcctagattctggttccttttccctttcactattcaacacacatgtaagtgcccattaggtgttaggtaccacactagacacttggaacagatagcagcaaataagaaacactgtccctatccatatgaagtacattacaatagcagctactggagggcaggcattatattacatactttgcatgcgtatctcacatcatacccacattattattctttttttttttttttttttggaaaaggggtccccttttgcccccagggggggggggcggggaaaggatctgggttaatgggctcccaccgggggacaaaaccaaaatcctttctgaaaaaaaaaa

SEQ ID NO: 490 - DNA, 1052 bp, Homo sapiens
ttttttttttttatttttaaccatcatttatttaactcgtcatgtttgaactgttaggttgtatttatcgttttctgtattacagacgacttgatgacaaatgaccaatcctctaatgttcaatataaaaatatcaattgcataaggagataaggggcatttggctaaaataaaattcagtgtgccccaccctctccacatgtaatttgctctaaaaaggcatgaatgactaaattagcccttctattctccagcgcagctcctgagcccagcggtgggtgcaggtgcttagagcccgggctttgctcttctgccgccagaaaggcgaaggggcaccccaaccccgggattctccctctcccttttttataaatagaagagtgctcagggtcagtgcatgagaccagcgctttttgactttgcacttatcagagtaacttagggggcttgtttaaaaatacacatttccctggctgagctcccagaaattggacttcagtggtttagcgggagtgtgcataggccaggtgattctgaggaccaacaggggttaggaattgccccgttaattctggccaagggagagatcagaccatccagcattgtccgcagcagagtttttccccctcttttgcaatgaatatttgatgctcagagggatgagccccaggatgaggcacacatccaagaaaaatccatgcctctccatcttttccccaggattgccctaaggcgagccgctctttgtgattccttcactttccccggttcatagaacaggcctcttcttagtctgttttgttgtctcttatctgttcaacaaacacccactgcgcaggaccatcctccggtgagccgtcgagtggggccgtttgggagcccttcttcgtgggtgagcactgaaggaacccgggtcccataagcccgtgcttctatgggggctgccccctctcccatcgcagggtaaaaggcaccaggctgttaagcttttcccaccacctggaggatccactctccgtccgtccttcccggaattacaccacagtggtacg

SEQ ID NO: 491 - DNA, 692 bp, Homo sapiens
ctccaaaccacctttcactctcagaaaatgagaccacaaaggagtatgctataaatcaaatttgccaaccaattatgtagatattactcattctaggactaatgatgatggtaaagaagttgccagtgttatggcaatgaaaatttcagaaaggaggagttgatgatcttctagatgtatatgaacacctgtctatatctgcatgtatatgttttgacctgcagtggttgcaatgttgatatgtgttcaagattattcctgtctacaaaactgaaggcccatgttcaaattgttctttattgggtgtttttatggtcacgtggtaacaattttcttacctaacctacaaaaggttctcttgatgaacatttttatttatatttactaatctttttaaaaaaaagctttcatagcattatataatcagatgaagaaagcccagtagaataaaaaaaaaattcattagcctagcctatattatgttttctgtcaaaggaaaacaaattctcaaatagggaattctaaaaatatttactaaagtaaaataactacttaaaatgttttattccagttgggaagggaagggtacaggggaggaaattggccaattatttaggggagaagtatatttattataagatggtgtcctcaaattagcctaccatggcacgtaggggcagcagctatattag

SEQ ID NO: 492 - DNA, 485 bp, Homo sapiens
  misc_feature (1)...(485): n = a,t,c or g
tgggcccgnnnaactgaggaactgantatctaggaagagcggnggaattcatattgcatgtccatattttccaaaaagagttaagatagcaagctactgtttaggattatggtaattctggatgtccttgaactgtatcacatgtggtttcttggcatattatatgatgcaattttttattgctttgtccatgcaataaacgctgataaatttttcggtttaaaattaaccaagtctgctactgtatcccagaattctcaatgaaagaaaatatttacagtttttaacattacaggtagaaaaaggatcaaagtgattttcttaaatttccttctaattcatggaaaagagaacacagtcagtgagggtctttgctcctgttccccaattttctttgtccaaatggctcatccttgaattcaagaggagtggtgcaggatttaattgctcccacttgtcttccttgtgcaaaactgcagctagaa

SEQ ID NO: 493 - DNA, 741 bp, Homo sapiens
aaaatgttaaagaactatctttccaaaacgtaaacactgccttccctttacttaaatgtacgattttcttttgctcttgagttttattttcatagtggcatcttactggtctttcctttccaccatatttttggatgttgtgtgttccattttacattgcccagttaaaccacagacactcctgaagtcatgtttacatgtggactgcaagtcaacctagttggcatgttgatctaagctacaaattgcactgctgttttgccgaacccaacagtcggtttcttgccattatttgcggtattttaacttaaaactcacggtaatccttctcaccccatctagtttgttttaattgatctaacaaacactgcttgtttgaattcaaatggaggatccatggaagctctcccaccccaccctttgatacttgataaggggtcaaacagtacttcttttaaattcagataattctttgaatgaactatgaaatacttcagagggaaaggaaatatcgattctgagatggagagtaaaagaacaaggagatattcattactgttgcagataatttcttgcaatgaaggaaaaaattagacggtggatattttttgttgtggtgcgtgcatagggagataggtggaccataaaacactcttccttggggaccgcaagtctcaacctagaactcatctttgaagctgttactttacttgaacactccctttggaaggggatctcaaa

SEQ ID NO: 494 - DNA, 1667 bp, Homo sapiens
gtcgacccacgcgtccggcagtgtaggggtggcgtgtcggagccccacactacaccacagggatgagcgtgtatccccttcagaggtgtgcctggggactccgtgtgcgcgactaggtgctctcctggggctggcaggggcatctgtccctttaccggagcaatggggagggtgcacacggttcaccagctttcgggctagctgggtaggaggtgatgctgccccggtctggcacccacttccccgggcctctcctaacccataggacagtagtgctcctggcttgtgctgcccagaggctacctggctttccctaattcaccgaccccaggattaaccccatggtggttggtatcaggggatgaggccagagccctttgagctgtgcccctcacaggggtagggtcatggcctcagccatcccggtaccatctgtgcccagccggggactgggaacctggtttctccatgaggagccatcccagggcctgcaggagggactagaagccagaggactctgaggctccgcttcctggggactgcagggggatcagaatgtcccaagcttgggacagtctgggaaggcagtggccatcccatccagatgagtacatccctctctccttgcctacttccctcctaccagccgtcgcggaggccactgatcctgtgtggtgttcaccccaggacgtgggaggctgctctgtccctctggccttagtttccacatctgtatggtggggttggggggcatgagtcagcttctgttggccagcttactgccccctgtgccccaaggcagccccacccggaggaagctccctgcttccctcctggtctccacagccctcatcagccctgtttgtgtcaggggctggatgtggcaaaacttgcaaaaccgcattcatggcagtcacacatctgcacgcagggttccctccctgcctggggctgggcaggtaggtgtccggtgggaagcgggccctgcctgcaggactcagcccagccctcaaaacctggcacccaggccacatccctcagcggcacagttaattgaaaatgcagctttgaggagtgcaatgtctggggaaagactgttcccagaggggcaggagcatctggggcctctggtggctcccagggtccccatgggaggagccctgtgccctccactcccaagtctcagttgtgccatctgtaaagtgggggccgccagggaggctggaggaaggtgacgggacttcaggccttggaatggggctgagtgaggggttcacatggccaccccatccctctccacgctccacccgctgggttgataccaccaggcggtggtttctgggtcacatttgctgcaattcaggtgctaatgggggcaggaggctgcagggggaggggccggtgtctagtggggcagatgtttctcaatggagaatgctcacagcggcctgcagagggggtctggtgtggcctggggctcatggggttgggatttacacagtgagcctgggctttggggcacagctgctgctgacagagggtcttggggtctgggaaggtgcttaaagcccggcccccatgcctgagctcccacacccctgtttagggacacccagatagggtgtctcctgcaggaaattccccacataattcatttatttaaaaaa

SEQ ID NO: 495 - DNA, 629 bp, Homo sapiens
  misc_feature (1)...(629): n = a,t,c or g
aacatttccagaaccagacagcatcctcacttgtacccactaaaggtaactactagtgtgacttctatctttgttggttggttgtatccattcttgtacatcataaagatgaaaccatattgtatgtatccttttctgtctggcctccttagctccttattattttgggttgagtcattgatgttgttatgtgtgcagatggttctttttttaatgctatgtgtattggattacaggatatattgcatcaaaatttatgtatccattatattattaatgagcatttggattatttcaatttaagactattttgaatacaattactgtaattgtcttgttcatatcatgtgttcaacatatgcacttactcctaagagaggaatttgtaggtcataggatatgtgtatgatcagcttgggtatacactaccagttttctcctgtcaaccaggcatgagaaatctaattgccctatgtgctgactaaaacatgaaattgggaggcctctaattctaacccttctggagagggcccccccccccccctggggggggggccntccccccccaccccgnnggggnnaattttaaaataaagtcgtggttaagttatagatttttttaaaaaatt

SEQ ID NO: 496 - DNA, 757 bp, Homo sapiens; identical to SEQ ID NO: 24
  misc_feature (1)...(757): n = a,t,c or g

SEQ ID NO: 497 - DNA, 429 bp, Homo sapiens
cacaacatggctgcggcgcctgggctgctcgtctggctgctcgtgctccggctgccctggcgggtgccgggccagctggaccccagcactggccggcggttctcggagcacaaactctgcgcggacgacgaatgcagcatgttaatgtaccgcggtgaggctcttgaagatttcacaggcccggattgtcgttttgtgaattttaaaaaaggtgatcctgtatatgtttactataaactggcaagaggatggcctgaagtttgggctggaagtaaatgagatgccacctgtggtcccaactgacaaagattaaggaaggttggacgcacttttggatattttccaaaagatttaatccaggtagttcatgaatataccaaagaagagctacaagttccaacagatgagacggattttgtttgttttgag

SEQ ID NO: 498 - DNA, 385 bp, Homo sapiens
ggtggaaaaagtttgagagaaggagggaggaaaaggtgtcctggctagcaccatgtggattctcttgagatgagaagaaaatgcccggctacgtcccccttctgctgctcctgcttctcctgaggtgttcacaacggggtggaggagttaattttggtgagaaggatgcaaaagtccccgggacctggagagatggagtcagggtccctggagaaggagcctcttgggactcagacagggccagtcctgagcgaaggtacggaataggtgagtgaaccttgggaactccggaccctgttatctaccctcaatcacctgccacagggaggcagggaccccagcgtctttctcatatacccttttaaggaaatgctctgcttttgat

SEQ ID NO: 499 - DNA, 533 bp, Homo sapiens
gattagtttaaattatcataaaagtgcttgaaaatctttaacttgcatgtaaatttggaattctgaaaaattcataaataccctgccagtatctatgaaaggaaaagctgcagatccgactatataccaataatccatttttctaaaagttcagagaaactctgtagctcattattcctgggatataaggtaatcctggctgggttatgaaatttcttctcatgtctcttccctatagacatctcttttgtatcactcaggctattctttctgaaatagctgaaggtattagaaacgatccattcaaattttatctttattctgttcttgcccttttcctccactattatatgtatgtttttgtttcaaggttcagtatctactacttaaagttacttagaatttttaagttttcctaatataaacaagcatttgaaagaaactactttaattgttatgatgactaaacttgtctcaaaccaaaaatatgcgctaaacactacgtagtaagaatgagaccagcctgggcaaca

SEQ ID NO: 500 - DNA, 744 bp, Homo sapiens
ggctattacatagaaattttgtagaatctaataagataaactagaaacatgacatgttcagctgttttctctacgaataaacaaattggcgctaaaactggtcttgctatctagatttctagttatatctcagttatcttttccccacatgggatgtgaaagtaatgttatatgctttcttatgtacgtacttttgacttaggtcagtctccacactgcattaaaattactaatgagacaaattgcagttttccagaggttcatgtttccatttctccttccttggctttcctgcatttttagctccagtcaaaattctatttattatgtatcaacttttataaaatgcttggctttgaaaagtataattaaaagacaaagatctgaaattaatagcgggtttttagctatctatcatgcattaagaaatcaagtgaccaggtgtggtggcctgtaatcctatcactttgggaggctgaagtgggaggaccacttgagctcaggagttcaagaccagcctgggcaacatagcaagaccctgtctctactaaaaataaaaaaaattgaccaggtggggtggtgcatgcctgtagttccagctacttgggaacgcctaggggggaaagaatggttgggcccccgagggggggaaatacacagaggctttggggggcccccaccggccattataactgggggggaaaaggggggcccccccccccttcctttttttttttttattaa

SEQ ID NO: 501 - DNA, 337 bp, Homo sapiens
agaactgtttgtggaaaacaacggggctcacttacgacatgcctagaaggacaagagggggattgtggctgtgcaatgcccacaaaagttgccagaagtacttatcatctttgaaattatccactttgttatcccctttgctggtgttgcctttttataccccatctcttaaaggatggggcatttttgttttgaggttttattttatggtaattatagccgactgtaacctgttcaaaataataatttaggagctcttctagagttgggaatgctgagaatttttaaaaattactaaaacttggaatagctttttcaaatgccaaagcagatttgg

SEQ ID NO: 502 - DNA, 412 bp, Homo sapiens
accacgcgtccgggtgaaatgttaaccctctcattagatctactagtttatcctgttgattctattgtgttttctatgtaaatgattttgtcagctataaataataacattttattttctctttccttgcaatacctatgctcatttattttttatgtttacccattggttagggcctcctgtatacattaaacagttcatagtcatgatagtgagtattcttacactgttcccagtattacagggaatgcttagaaattttctttatttaaacattatgtttgttgtagccttgttaaaggctattttataatttttactagaaatattttgacatttattgggatttttttctatctctaatctattgagataggcacattccttttgcttcactccattataaagggag

SEQ ID NO: 503 - DNA, 852 bp, Homo sapiens
  misc_feature (1)...(852): n = a,t,c or g
atgagccnnttgacttgatcgcctgcttggactagggcctgattcacagacgctccaggatggagcggggcgcaggagccaagctgctgccgctgctgctgcttctgcgggcgactggtttcacatgtgcacaggcagatggccggaacggctacacggcggtcatcgaagtgaccagcgggggtccctggggcgactgggcctggcctgagatgtgtcccgatggattcttcgccagcgggttctcgctcaaggttggggctcaggcgtaggtcctggagagggcggagatgcgtgggaccatagagccaaggatgataattccgtgactcgcccttgcccctctcctcgatacccaggtggagcctccccaaggcattcctggcgacgacactgcactgaatgggatcaggctgcactgcgcgcgcgggaacgtcctaggcaatacgcacgtggtagagtcccagtctggaagctggggcgaatggagtgagccgctgtggtgtcgcggcggcgcctacctagtggctttctcgcttcgcgtggaggcacccacgaccctcggtgacaacacagcagcgaacaacgtgcgcttccgctgttcagacggcgaggaactgcaggggcctgggctgagctggggagactttggagactggagtgaccattgccccaagggcgcgtgcggcctgcagaccaagatccagggacctagaggcctcggcgatgacactgcgctgaacgacgcgcgcttattctgctgccgcaagttgtaaagcgccggcgccgccgctcatctccacgggccaggaggctagtcccacctcttgctattaaagcttctctgagttg

SEQ ID NO: 504 - DNA, 407 bp, Homo sapiens
cacagtaaaagagctctagaacctgggtcctagtttgttcctataaatatgacgcaagtggagagagtgatcgtgttcctgaccctgagtactttgagccttgctaagaccacccagcccatcttcatggactcatatgaaggacaagaagtgaacataacctgtagccacaacaacattgttacaaatgattatatcacgtggtaccaacagtttcccagccaaggaccacgatttattattcagggataccagaaaaaagttaccaacgaagtggccttcctgtgtatccctgccgacagaaagtccatcactctgaacctgccccgggtttctctagaagacactggtgggaaataactgcttgtgggtgatagacacaatgattagttttgggagcccgaacc

SEQ ID NO: 505 - DNA, 404 bp, Homo sapiens
aacatccgggccgcgcggggaaggggagacgtggggtagagtgaccatgacgaaattagcgcagtggctttggggactagcgatcctgggctccacctgggtggccctgaccacgggagccttgggcctggagctgcccttgtcctgccaggaagtcctgtggccactgcccgcctacttgctggtgtccgccggctgctatgccctgggcactgtgggctatcgtgtggccacttttcatgactgcgaggacgccgcacgcgagctgcagagccagatacaggaggcccgagccgacttagcccgcagggggctgcgcttctgacagcctaaccccattcctgtgcggacagcccttcctcccatttcccattaaagagccagtttattttctaaaaaaaaaa

SEQ ID NO: 506 - DNA, 1868 bp, Homo sapiens
  misc_feature (1)...(1868): n = a,t,c or g
cataaggttgtagtagcaggagccctctatcttttgttcgggnncatggaaggggtcctcanagcnncngagactcagactgatcttgcttacttggcctttatccccttggctttcctagaccttggcctgcgcagctgggtgcagacaacatccccccaccacccaagagggagggtagctcttccgccaccaggggcaagcacatttgtatcggcatttcaccaacacgcttattttggcagtggcagcatccattgtgtttatcatctggacaaccatgaagttcagaatagtgacatgtcagtcggactggcgggagctgtgggtagacgatgccatctggcgcttgctgttctccatgatcctctttgtcatcatggttctctggcgaccatctgcaaacaaccagaggtttgccttttcaccattgtctgaggaagaggaggaggatgaacaaaaggagcctatgctgaaagaaagctttgaaggaatgaaaatgagaagtaccaaacaagaacccaatggaaatagtaaagttaacaaagcacaggaagatgatttgaagtgggtagaagagaatgttccttcttctgtgacagatgtagcacttccagcccttctggattcagatgaggaacgaatgatcacacactttgaaaggtccaaaatggagtaaggaatgggaagatttgcagttaaagatggctaccatcagggaagagatcagcatctgtgtcagtcttctgtacggctccatgggattaaaggaagcaatgacatcctgatctgttccttgatctttgggcattggagttggcgagaggtgtcagaacaaagagaacatcttactgaaaacaagttcataagatgagaaaaatctacgagcttcttatttacaacactgctgccccctttcctcccagactctgacatggatgttcatgcaacttaagtgtgttgttcctgaactttctgtaatgtttcattttttaaatctgacaaactaaaaagtttaacgtcttctaaaagattgtcatcaacaccataatatgtaatctccaggagcaactgcctgtaatttttatttatttagggagttacataggtgatgggggaaattgttaactacctttcattttcctgggaagtcaaggttacatcttgcagaggttgttttgagaaaaaagggcccttctgagttaaggagccatagttctatcaatgatcaaaagaaaaaaaaaaaaaagagaaactgttacagtatgattcagatcatttaaaaaagcaaaatcaagtgcaattttgtttacaaatggtgtatattaaagatttttctatttcagatgtactttaaagagaaatattagcttaactcttttgacatctgctattgtgacacatcccattgctggcaatgtggtgcacactccgaaacttttaactactgttttgtaagcctccaagggtggcattgcagggtccttaggcaatgttttgtttgcctttatgccagagaggtgctccaagtgctgtgattgagcaccgtgctagaggaactgtaatgcttcagaagttgtagcttatacaaaggaaacaggtcctgctggcttaatttaaacagttattgcatgaagtagcgtggaggccctggactgctgctcgttctttaggatggactggttctggtatctggtattgggtttagagactgttaataagggacatcacaaggtgatggggattcatttgaagcactctatttctgttttaatggttttatccaattttgccttcccaagatttttgttctacataaaaagttcatgccactttttaatataaaaaaatttaacaaaaaaaaaaaa

SEQ ID NO: 507 - DNA, 1073 bp, Homo sapiens
ctctggggcaggtgttggctctggtgctggtggccgctctgtggggtggcacgcagccgctgctgaagcgggcctccgccggcctgcagcgggttcatgagccgacctgggcccagcagttgctacaggagatgaagaccctcttcttgaatactgagtacctgatgccctttctcctcaaccagtgtggatcccttctctattacctcaccttggcatcgacagatctgaccctggctgtgcccatctgtaactctctggctatcatcttcacactgattgttgggaaggcccttggagaagatattggtggaaaacgagcagttgctggcatggtgctcaccgtgataggaatttcactctgcatcacaagctcagtgagtaagacccaggggcaacagtctaccctttgagtgggccgaacccacttccagctctgctgcctccaggaagcccctgggccatgaagtgctggcagtgagcggatggacctagcacttcccctctctggccttagcttcctcctctcttatggggataacagctacctcatggatcacaataagagaacaagagtgaaagagttttgtaaccttcaagtgctgttcagctgcggggatttagcacaggagactctacgctcaccctcagcaacctttctgccccagcagctctcttcctgctaacatctcaggctcccagcccagccaccattactgtggcctgatctggactatcatggtggcaggttcccatggactgcagaactccagctgcatggaaagggccagctgcagactttgagccagaaatgcaaacgggaggcctctgggactcagtcagagcgctttggctgaatgaggggtggaaccgagggaagaaggtgcgtcggagtggcagatgcaggaaatgagctgtctattagccttgcctgccccacccatgaggtaggcagaaatcctcactgccagcccctcttaaacaggtagagagctgtgagccccagccccacctgactccagcacacctggcgagtagtagctgtcaataaatctatggtaaacagacaaaaa

SEQ ID NO: 508 - DNA, 1073 bp, Homo sapiens; identical to SEQ ID NO: 507

SEQ ID NO: 509 - DNA, 2027 bp, Homo sapiens
tcccccacggagacgcgccaaggtagccccgcgcgtgtccgtaggcgcgctctctggaagacgcggtggggggtgcgcagggctgcaccctcacaccaattgccccggcgaaggccgagcccagaaagtgagtgcgcgtgagtgtgcgcgcgcccgcatgcgggggcgtggcagtcaacagcaacaacccacacgccggcagggccagaaactcccatctccctcaccagccggaaagtacgagtcggctcagcctggagggacccaaccagagcctggcctgggagccaggatggccatccacaaagccttggtgatgtgcctgggactgcctctcttcctgttcccaggggcctgggcccagggccatgtcccacccggctgcagccaaggcctcaaccccctgtactacaacctgtgtgaccgctctggggcgtggggcatcgtcctggaggccgtggctggggcgggcattgtcaccacgtttgtgctcaccatcatcctggtggccagcctcccctttgtgcaggacaccaagaaacggagcctgctggggacccaggtattcttccttctggggaccctgggcctcttctgcctcgtgtttgcctgtgtggagaagcccgacttctccacctgtgcctctcggcgcttcctctttggggttctgttcgccatctgcttctcttgtctggcggctcacgtctttgccctcaacttcctggcccggaagaaccacgggccccggggctgggtgatcttcactgtggctctgctgctgaccctggtagaggtcatcatcaatacagagtggctgatcatcaccctggttcggggcagtggcgagggcggccctcagggcaacagcagcgcaggctgggccgtggcctccccctgtgccatcgccaacatggactttgtcatggcactcatctacgtcatgctgctgctgctgggtgccttcctgggggcctggcccgccctgtgtggccgctacaagcgctggcgtaagcatggggtctttgtgctcctcaccacagccacctccgttgccatatgggtggtgtggatcgtcatgtatacttacggcaacaagcagcacaacagtcccacctgggatgaccccacgctggccatcgccctcgccgccaatgcctgggccttcgtcctcttctacgtcatccccgaggtctcccaggtgaccaagtccagcccagagcaaagctaccagggggacatgtaccccacccggggcgtgggctatgagaccatcctgaaagagcagaagggtcagagcatgttcgtggagaacaaggccttttccatggatgagccggttgcagctaagaggccggtgtcaccatacagcgggtacaatgggcagctgctgaccagtgtgtaccagcccactgagatggccctgatgcacaaagttccgtccgaaggagcttacgacatcatcctcccacgggccaccgccaacagccaggtgatgggcagtgccaactcgaccctgcgggctgaagacatgtactcggcccagagccaccaggcggccacaccgccgaaagacggcaagaactctcaggtctttagaaacccctacgtgtgggactgagtcagcggtggcgaggagaggcggtcggatttggggagggccctgaggacctggccccgggcaagggactctccaggctcctcctccccctggcaggcccagcaacatgtgccccagatgtggaagggcctccctctctgccagtgtttgggtgggtgtcatgggtgtccccacccactcctcagtgtttgtggagtcgaggagccaaccccagcctcctgccaggatcacctcggcggtcacactccagccaaatagtgttctcggggtggtggctgggcagcgcctatgtttctctggagattcctgcaacctcaagagacttcccaggcgctcaggcctggatcttgctcctctgtgaggaacaagggtgcctaataaatacatttctgctttattaaaaaaaaaa

SEQ ID NO: 510 - DNA, 459 bp, Homo sapiens
ggcacgagcttatatggttaaaacagacgcacacctaaaaaaccctccctttgctccctttagggtttatacattgaccctatcattgttattgaaattgtcacattactcttgtctttgggttaaaaaagactttaaagactcctcgttttacaatagcaataataatagcaatagcaatcattgtaaatctttattgagcactcactatatgccaggcgctgtaattagtaatttatgccttatctcatgtaaagtttccagcagccctattaagcagacacatggcatttccatgttacagatgaagagactgaaacacacattagctcgccttgccccagggacacatggtgggagccagaactaggagttgagcccaggcatactgatgcctggtgcacttggacgctgctgtacagccactccaggtgtggatgagcaggaaacacattgaag

SEQ ID NO: 511 - DNA, 1902 bp, Homo sapiens
gttccacctggcggctggctctcagtcccctcgctgtagtcgcggagctgtgtctgttcccaggagtccttcggcggctgttgtgtcagtggcctgatcgcgatggggacaaaggcgcaagtcgagaggaaactgttgtgcctcttcatattggcgatcctgttgtgctccctggcattgggcagtgttacagtgcactcttctgaacctgaagtcagaattcctgagaataatcctgtgaagttgtcctgtgcctactcgggcttttcttctccccgtgtggagtggaagtttgaccaaggagacaccaccagactcgtttgctataataacaagatcacagcttcctatgaggaccgggtgaccttcttgccaactggtatcaccttcaagtccgtgacacgggaagacactgggacatacacttgtatggtctctgaggaaggcggcaacagctatggggaggtcaaggtcaagctcatcgtgcttgtgcctccatccaagcctacagttaacatcccctcctctgccaccattgggaaccgggcagtgctgacatgctcagaacaagatggttccccaccttctgaatacacctggttcaaagatgggatagtgatgcctacgaatcccaaaagcacccgtgccttcagcaactcttcctatgtcctgaatcccacaacaggagagctggtctttgatcccctgtcagcctctgatactggagaatacagctgtgaggcacggaatgggtatgggacacccatgacttcaaatgctgtgcgcatggaagctgtggagcggaatgtgggggtcatcgtggcagccgtccttgtaaccctgattctcctgggaatcttggtttttggcatctggtttgcctatagccgaggccactttgacagaacaaagaaagggacttcgagtaagaaggtgatttacagccagcctagtgcccgaagtgaaggagaattcaaacagacctcgtcattcctggtgtgagcctggtcggctcaccgcctatcatctgcatttgccttactcaggtgctaccggactctggcccctgatgtctgtagtttcacaggatgccttatttgtcttctacaccccacagggccccctacttcttcggatgtgtttttaataatgtcagctatgtgccccatcctccttcatgccctccctccctttcctaccactgctgagtggcctggaacttgtttaaagtgtttattccccatttctttgagggatcaggaaggaatcctgggtatgccattgacttcccttctaagtagacagcaaaaatggcgggggtcgcaggaatctgcactcaactgcccacctggctggcagggatctttgaataggtatcttgagcttggttctgggctctttccttgtgtactgacgaccagggccagctgttctagagcgggaattagaggctagagcggctgaaatggttgtttggtgatgacactggggtccttccatctctggggcccactctcttctgtcttcccatgggaagtgccactgggatccctctgccctgtcctcctgaatacaagctgactgacattgactgtgtctgtggaaaatgggagctcttgttgtggagagcatagtaaattttcagagaacttgaagccaaaaggatttaaaaccgctgctctaaagaaaagaaaactggaggctgggcgcagtggctcacgcctataatcccagaggctgaggcaggcggatcacctgaggtcaggagttcaagatcagcctgaccaacatggagaaaccctactaaaaatacaaagttagccaggcatggtggtgcatgcctgtaatcccagctgctcaggagcctggcaacaagagcaaaactccagctcaaaaaaaaaa

SEQ ID NO: 512 - DNA, 1902 bp, Homo sapiens; identical to SEQ ID NO: 511

SEQ ID NO: 513 - DNA, 1263 bp, Homo sapiens
atgggactgcagaggccagctgcctctatgctgccctattcgacttccaatcagccagctgcctctacactgccctattcgacttccaatcagccagctgcgtctacactgccctattcgacttccaatcagccagctgcctctacactgccctattcgtcttccaatcagccagctgcgtctacactgccctattcgacttccaatcagccagctgcctctacactgccctattcgacttccaatcagccagctgcgtctacactgccctattcgacttccaatcagccagctgcctctacactgccctattcgacttccaatcagccagctgcgtctacactgccctattcgacttccaatcagccagctgcgtctacactgccctgttcaacttccagtcaccacagcttattccttgtggcctctgcgggtcctgcctcagccatgatgatccacggcttccagagcagccaccgggatttctgcttcgggccctggaagctgacggcgtccaagacccacatcatgaagtcggcggatgtggagaaattagccgatgaattacatatgccatctctccctgaaatgatgtttggagacaacgttttaagaatccagcatgggtctggctttggaattgagttcaatgctacagatgcgttaagatgtgtaaacaactaccaaggaatgcttaaagtggcctgtgctgaagagtggcaagaaagcaggacggagggtgaacactccaaagaggttattaaaccatatgattggacctatacaacagattataagggaaccttacttggagaatctcttaagttaaaggttgtacctacaacagatcatatagatacagaaaaattgaaagccagagaacagattaagttttttgaagaagttctcctttttgaggatgaacttcatgatcatggagtttcaagcctgagtgtgaagattagagtaatgccttctagctttttcctgctgttgcggtttttcttgagaattgatggggtgcttatcagaatgaatgacacgagactttaccatgaggctgacaagacctacatgttacgagaatatacgtcacgagaaagcaaaatttctagtttgatgcatgttccaccttccctcttcacggaacctaatgaaatatcccagtatttaccaataaaggaagcagtttgtgagaagctaatatttccagaaagaattgatcctaacccagcagactcacaaaaaagtacacaagtggaa

SEQ ID NO: 514 - DNA, 3200 bp, Homo sapiens
tttcgtgtggcggtggctgaggcggttgggcctagggtgcagcgggcgcgtctgcggctggtgttggcgcatctctagatcctttcccggagttcagttatgggtgtgagaggtttgcaaggatttgtgggaagtacctgcccacatatatgtacagtagtaaatttcaaagaactggcagagcaccaccgaagcaagtatcctggatgtacccctaccattgtggttgatgccatgtgttgtctcagatattggtatactccagaatcttggatctgcggtggccagtggcgagaatacttttctgctttgcgagattttgttaaaacttttacggcagctgggatcaagttgatattcttctttgatggcatggtggagcaggataagagagatgaatgggtgaaacgaaggctcaagaacaacagggagatatccaggatttttcattacatcaagtcacacaaggagcagccaggcagaaatatgttcttcatcccctcagggctagctgtgtttacacgatttgctctaaagacactgggccaggaaactttgtgttccttgcaggaagcagattatgaggtagcttcctatggcctccagcataactgtcttgggattctgggggaagacactgattacctaatctatgacacttgtccctacttttcaattagcgagctctgcctagagagcctggacaccgtcatgctctgcagagagaagctctgtgagagtctgggcctctgtgtggccgaccttcctcttctggcctgcctccttggcaacgacataatcccagagggcatgtttgaaagctttaggtacaaatgcttatcgtcctacacctctgtaaaagagaactttgacaaaaaaggtaacatcatattagctgtgtcagaccatatatcgaaagttctttacttgtatcaaggtgagaaaaaattagaagagatattacctctgggaccaaacaaagctcttttttataaaggaatggcatcatatcttttaccaggacaaaaatctccatggtttttccaaaaacccaaaggtgtaataactttggacaaacaagtaatatccacgagttcagacgccgaatccagggaagaagttcccatgtgttcagatgctgaatccaggcaagaagttcccatgtgtacaggccctgaatccaggcgagaagttcccgtgtatacatattctgaacccaggcaagaagttcccacgtgttcagaccctgaacccaggcaagaagttcccacgtgtacaggccctgaatccaggcgagaagttcccatgtgttcagaccctgaacccaggcaagaagttcccatgtgtacaggccctgaacccaggcaagaagttcccatgtgtacaggccctgaagccaggcaagaagttcccatgtgtacagactctgaacccaggcaagaagttcccatgtgtacagactctgaacccaggcaagaagttcccatgtatacaggctctgaacccaggcaagaagttcccatgtatacaggccctgaatccaggcaagaagttcccatgtatacaggccctgaatccaggcaagaagttttaatacggacagaccctgaatctaggcaagaaattatgtgtacaggccatgaatccaaacaggaagttcccatatgtacagatcctatatccaagcaagaagactccatgtgtacacacgctgaaatcaatcaaaaattacctgtagcaacagattttgaatttaagctagaagctctcatgtgtacaaaccctgaaattaaacaagaagaccccacaaatgtggggcctgaagtaaagcaacaagtaaccatggtttcagacactgaaatcttaaaggttgctagaacacatcacgtccaagcagaaagctacctggtgtacaacatcatgagcagtggagagattgaatgcagcaacaccctagaagatgagcttgaccaggccttacccagccaggccttcatttaccgtcccattcgacagcgggtctactcactcttactggaggactgtcaagatgtcaccagcacctgcctagctgtcaaggagtggtttgtgtatcctgggaacccactgaggcacccggacctcgtcaggccgctgcagatgaccattccagggggaacgcctagtttgaaaatattatggctgaaccaagagccagaaatacaggttcggcgcttggacacactcctagcctgtttcaatctttcctcctcaagagaagagctgcaggctgtcgaaagcccatttcaagctttgtgctgcctcttgatctacctctttgtccaggtggacacgctttgcctggaggatttgcatgcgtttattgcgcaggccttgtgcctccaaggaaaatccacctcgcagcttgtaaatctacagcctgattacatcaaccccagagccgtgcagctgggctcccttctcgtccgcggcctcaccactctggttttagtcaacagcgcatgtggcttcccctggaagacgagtgatttcatgccctggaatgtatttgacgggaagctttttcatcagaagtacttgcaatctgaaaagggttatgctgtggaggttcttttagaacaaaatagatctcggctcaccaaattccacaacctgaaggcagtcgtctgcaaggcctgcatgaaggagaacagacgcatcactggccgagcccactggggctcacaccacgcagggaggtggggaagacagggctccagctaccacaggacgggctctgggtatagccgttccagtcagggacagccgtggagagaccagggaccaggaagcagacagtatgagcatgaccagtggagaaggtactagtcaacctccagaaagagtatggagagaaaaagaggcacacctggacgcagagccctgccagcgccctcctctgctgttgcagctgcaaggagaccatgcctgtgggagccaggcctcgcttgcatgaagaaggaacgatgcctttttcaatggtgtctccctcccattgtgcagaagagcttttgttggcttctctcccgagcttgtgcctgattctgtggcccaaaacaatcattgttaacatcttcatgtgtttcattctgatctttcattcatatatatgatgcctagctaatttcattttaaaataaatgggaatctgttgtaaaaaa

SEQ ID NO: 515 - DNA, 3200 bp, Homo sapiens; identical to SEQ ID NO: 514

SEQ ID NO: 516 - DNA, 1756 bp, Homo sapiens
  misc_feature (1)...(1756): n = a,t,c or g
tgcctaacagaggtgtcctctgacttttcttctgcaagctccatgttttcacatcttccctttgactgtgtcctgctgctgctgctgctactacttacaaggtcctcagaagtggaatacagagcggaggtcggtcagaatgcctatctgccctgcttctacaccccagccgccccagggaacctcgtgcccgtctgctggggcaaaggagcctgtcctgtgtttgaatgtggcaacgtggtgctcaggactgatgaaagggatgtgaattattggacatccagatactggctaaatggggatttccgcaaaggagatgtgtccctgaccatagagaatgtgactctagcagacagtgggatctactgctgccggatccaaatcccaggcataatgaatgatgaaaaatttaacctgaagttggtcatcaaaccagccaaggtcacccctgcaccgactctgcagagagacttcactgcagcctttccaaggatgcttaccaccaggggacatggcccagcagagacacagacactggggagcctccctgatataaatctaacacaaatatccacattggccaatgagttacgggactctagattggccaatgacttacgggactctggagcaaccatcagaataggcatctacatcggagcagggatctgtgctgggctggctctggctcttatcttcggcgctttaattttcaaatggtattctcatagcaaagagaagatacagaatttaagcctcatctctttggccaacctccctccctcaggattggcaaatgcagtagcagagggaattcgctcagaagaaaacatctataccattgaagagaacgtatatgaagtggaggagcccaatgagtattattgctatgtcagcagcaggcagcaaccctcacaacctttgggttgtcgctttgcaatgccatagatccaaccaccttatttttgagcttggtgttttgtctttttcagaaactatgagctgtgtcacctgactggttttggaggttctgtccactgctatggagcagagttttcccattttcagaagataatgactcacatgggaattgaactgggacctgcactgaacttaaacaggcatgtcattgcctctgtatttaagccatcagagttacccaacccagagactgttaatcatggatgttagagctcaaacgggcttttatatacactaggaattcttgacgtggggtctctggagctccaggaaattcgggcacatcatatgtccatgaaacttcagataaactagggaaaactgggtgctgaggtgaaagcataacttttttggcacagaaagtctaaaggggccactgattttcaaagagatctgtgatccctttttgttttttgtttttgagatggagtcttgctctgttgcccaggctggagtgcaatggcacaatctcggctcactgcaagctccgcctcctgggttcaagcgattctcctgcctcagcctcctgagtagctgggattacaggcatgcaccaccatgcccagctaatttgttgtatttttggtagagacagggtttcaccatgttggccaggctggtctcaaactcctgacctcatgatttgcctgcctcggcctcccaaagcactgggattacaggcgtgagccatcatgcccagcccataatacctcatttataatccactaaatggatgtctctactctcgcctncnnnnatcgtcgacccgggaatt

SEQ ID NO: 517 - DNA, 3195 bp, Homo sapiens
tttcgtggaaatcagtgtggctgtccagctgggctgagtcgcccaagaaggacgtgacaggtgccgacgccaccgccgagcccatgatcctggaacagtacgtggtggtgtccaactataagaagcaggagaactcggagctgagcctccaggccggggaggtggtggatgtcatcgagaagaacgagagcggctggtggttcgtgagcacttctgaggagcagggctgggtccctgccacctacctggaggcccagaatggtactcgggatgactccgacatcaacacctctaagactggagaagaggagaagtatgtcaccgtgcagccttacaccagccaaagcaaggacgagattggctttgagaagggcgtcacagtggaggtgatccggaagaatctggaaggctggtggtatatcagatacctgggcaaagagggctgggcgccagcatcctacctgaagaaggccaaggatgacctgccaacccggaagaagaacctggccggcccagtggagatcattgggaacatcatggagatcagcaacctgctgaacaagaaggcgtctggggacaaggaaactccaccagccgaaggcgagggccatgaggcccccattgccaagaaggagatcagcctgcccatcctctgcaatgcctccaatggcagtgccgtgggcgttcctgacaggactgtctccaggctggcccagggctctccagctgtggccaggattgcccctcagcgggcccagatcagctccccgaacctacggacaagacctccaccacgcagagaatccagcctggggttccaactgccaaagccaccagagcccccttctgttgaggtggagtactacaccattgccgaattccagtcgtgcatttccgatggcatcagctttcggggtggacagaaggcagaggtcattgataagaactcaggtggctggtggtacgtgcagatcggtgagaaggagggctgggcccccgcatcatacatcgataagcgcaagaagcccaacctgagccgccgcacaagcacgctgacccggcccaaggtgcccccgccagcaccccccagcaagcccaaggaggccgaggagggccctacgggggccagtgagagccaggactccccgcggaagctcaagtatgaggagcctgagtatgacatccctgcattcggctttgactcagagcctgagctgagcgaggagcccgtggaggacagagcctcaggggagaggcggcctgcccagccccaccggccctcgccggcctcttctctgcagcgggcccgcttcaaggtgggtgagtcttcagaggatgtggccctggaagaggagaccatctatgagaatgagggcttccggccatatgcagaggacaccctgtcagccagaggctcctccggggacagcgactccccaggcagctcctcgctgtccctgaccaggaaaaactcccccaaatcaggctcccccaagtcatcatcactcctaaagctcaaggcagagaagaatgcccaggcagaaatggggaagaaccactcctcagcctccttttcctcatccatcaccatcaacaccacttgctgctcctcctcttcctcctcctcctcttccttgtccaaaaccagtggcgacctgaagccccgctctgcttcggacgcaggcatccgcggcactcccaaggtcagggcaaagaaggatgctgatgcgaacgctgggctgacctcctgtccccgggccaagccatcggtccggcccaagccattcctaaaccgagcagagtcgcagagccaagagaagatggacatcagcactttacggcgccagctgagacccacaggccagctccgtggagggctcaagggctccaagagtgaggattcggagctgcccccgcagacggcctccgaggctcccagtgaggggtctaggagaagctcatccgacctcatcaccctcccagccaccactcccccatgtcccaccaagaaggaatgggaagggccagccacctcgtacatgacatgcagcgcctaccagaaggtccaggactcggagatcagcttccccgcgggcgtggaggtgcaggtgctggagaagcaggagagcgggtggtggtatgtgaggtttggggagctggagggctgggccccttcccactatttggtgctggatgagaacgagcaacctgacccctctggcaaagagctggacacagtgcccgccaagggcaggcagaacgaaggcaagtcagacagcctggagaagatcgagaggcgcgtccaagcactgaacaccgtcaaccagagcaagaaggccacgccccccatcccctccaaacctcccgggggctttggcaagacctcaggcactccagcggtgaagatgaggaacggagtgcggcaggtggcggtcaggccccagtcggtgtttgtgtccccgccacccaaggacaacaacctgtcctgcgccctgcggaggaatgagtcactcacggccactgatggcctccgaggcgtccgacggaactcctcctttagcactgctcgctccgctgccgccgaggccaagggccgcctggccgaacgggctgccagccagggttcagactcacccctactgcccgcccagcgcaacagcatccccgtgtcccctgtgcgccccaagcccatcgagaagtctcagttcatccacaataacctcaaagatgtgtacgtctctatcgcagactacgagggggatgaggagacagcaggcttccaggagggggtgtccatggaggttctggagaggaaccctaatggctggtggtactgccagatcctggatggtgtgaagcccttcaaaggctgggtgccttccaactaccttgagaaaaagaactagcagagggcctgggctcttccagcctcagtgtgcctctctggccgcccactggatgagcggtgagacgaacaaaagggaaaggaaaaaatgggggtggggggtggggggtggacaacattcaacactgcagaatgggtgacctcaaagatgccccctgtccaagccatcccacagctggaaggtaggggatgggggtgcccacactgagtgaggaagggaatggaccagggagtaccaaacctgggacccagagccaagtaagctgtattgcggccgctctggaggattc

SEQ ID NO: 518 - DNA, 930 bp, Homo sapiens
aacaaattagatatgatttgttttttaagttgaggcttagccagaagggtttgtatggacctcttaaattaaggtttgtttcacagtggggataatgtttgctatgtcaataaacaggtacttttctttcatcattctccaaatttggttcttaatgagatctgacatcccctcttccattagaaggtattgaaatccagtggaccagtttctccaagatgtctcttgaaagtaaaactctgcttaaaatctgttttttccagggctctaatcactactctgttaaattcctcaaacttgtaatgccccaaggcttgattttttccagataatggctctatcgttgcacataccctgattctgtcagtatgtgtcattggcaaaatagctttctctgccaaagctttctgacctttggctccatcttagctttgttagcaggaaaggcctgctacccagagtcagagtcaatcagagaattgttcatgtgggccttagaactttactccttacccttttatcttttctttaaactttcgcctctaaatctgccagggaaattgggacttatagaaaccttgtcaacttgttgggggcaaaaattagatcctgtgttagaaactctgcaaagagtgagatccatggcatcattgatcgccaacttctttgttcctttcatccagaagaaaggtcagctcattacgtaagaaacttttcatcaggaaaagcagacaaccgataaaaaacagaaactaagtattctgcaaggaaacctggtttaaggagaatgtattgaaactggatatgcctgttcctttgtactcctccctttggcattgtcctttttttttctgtaagataatcataagaatttaggtaatggagggactacaaagatcacatggctttatgggttcgcctattatgctg

SEQ ID NO: 519 - DNA, 869 bp, Homo sapiens
ttttttttttttgattgacaatgagaatatttattgagggtttattgagtgcagggagaagggcttgatgccttggggtgggaggagagacccctcccctgggatcctgcagctctagtctcccgtggtgggggtgagggttgagaacctatgaacattctgtaggggccactgtcttctccacggtgctcccttcatgcgtgacctggcagctgtagcttctgtgggacttccactgctcaggcgtcaggctcaggtagctgctggccgcgtacttgttgttgctttgtttggagggtgtggtggtctccactcccgccttgacggggctgctatctgccttccaggccactgtcacggctcccgggtagaagtcacttatgagacacaccagtgtggccttgttggcttgaagctcctcagaggagggcgggaacagagtgaccgagggggcagccttgggctgacctaggacggtcagcttggtccctccgccgaacatcacagcagtgctgctgtcccacgcctgacagtaataatcagcctcatccatagcctgggtcccgctgatggtcagagtggctgtgttcccagagttggagccagagaatcgctcagggatctctgagggccgcttgtcatcttgataaatgaccaacacaggggactggcctgccttctgttgataccaggcaacatatttattgcccaggttatctccagagcaggtgatgctggctgtctgtcctggggacacggacactgagggtggctgagtcaactcataggaggccacggatcctgtgcagtaagcaaggacgccgaggaagagagggatccatgccatggctgagcgacctccgatgctg

SEQ ID NO: 520 - DNA, 2912 bp, Homo sapiens
tttcgtggtccgccaggctccaggcaaggggctggagtgggtggctctcatatcacctgctggcagccatcaacagtacgcagactccgtgaagggccgattcaccgtttccagagacgattcccagaacatgctttttctgcaaatggacagactgagacctggagacacggctgtctattactgtgcgagagaaaaggaatcttcctttgactgttggggccagggatctctcgtcaccgtctcctcagcctccaccaagggcccatcggtcttccccctggcgccctgctccaggagcacctccgagagcacagcggccctgggctgcctggtcaaggactacttccccgaaccggtgacggtgtcgtggaactcaggcgccctgaccagcggcgtgcacaccttcccggctgtcctacagtcctcaggactctactccctcagcagcgtggtgaccgtgccctccagcagcttgggcacgaagacctacacctgcaatgtagatcacaagcccagcaacaccaaggtggacaagagagttgagtccaaatatggtcccccatgcccatcatgcccagcacctgagttcctggggggaccatcagtcttcctgttccccccaaaacccaaggacactctcatgatctcccggacccctgaggtcacgtgcgtggtggtggacgtgagccaggaagaccccgaggtccagttcaactggtacgtggatggcgtggaggtgcataatgccaagacaaagccgcgggaggagcagttcaacagcacgtaccgtgtggtcagcgtcctcaccgtcctgcaccaggactggctgaacggcaaggagtacaagtgcaaggtctccaacaaaggcctcccgtcctccatcgagaaaaccatctccaaagccaaagggcagccccgagagccacaggtgtacaccctgcccccatcccaggaggagatgaccaagaaccaggtcagcctgacctgcctggtcaaaggcttctaccccagcgacatcgccgtggagtgggagagcaatgggcagccggagaacaactacaagaccacgcctcccgtgctggactccgacggctccttcttcctctacagcaggctaaccgtggacaagagcaggtggcaggaggggaatgtcttctcatgctccgtgatgcatgaggctctgcacaaccactacacacagaagagcctctccctgtctctgggtaaatgagtgccagggccggcaagcccccgctccccgggctctcggggtcgcgcgaggatgcttggcacgtaccccgtgtacatacttcccgggcgcccagcatggaaataaagcacccagcgctgccctgggaagtatgtagacggggtacgtgccaagcatcctcgtgcgaccgcgagagcccggggagcgggggcttgccggccgtcgcactcatttacccggggacagggagaggctcttctgcgtgtagtggttgtgcagagcctcatgcatcacggagcatgagaagacgttcccctgctgccacctgctcttgtccacggtgagcttgctatagaggaagaaggagccgtcggagtccagcacgggaggcgtggtcttgtagttgttctccggctgcccattgctctcccactccacggcgatgtcgctgggatagaagcctttgaccaggcaggtcaggctgacctggttcttggtcatctcctcccgggatgggggcagggtgtacacctgtggttctcggggctgccctttggctttggagatggttttctcgatgggggctgggagggctttgttggagaccttgcacttgtactccttgccattcagccagtcctggtgcaggacggtgaggacgctgaccacacggtacgtgctgttgtactgctcctcccgcggctttgtcttggcattatgcacctccacgccgtccacgtaccagttgaacttgacctcagggtcttcgtggctcacgtccaccaccacgcatgtgacctcaggggtccgggagatcatgagggtgtccttgggttttggggggaagaggaagactgacggtccccccaggagttcaggtgctgggcacggtgggcatgtgtgagttttgtcacaagatttgggctcaactttcttgtccaccttggtgttgctgggcttgtgattcacgttgcagatgtaggtctgggtgcccaagctgctggagggcacggtcaccacgctgctgagggagtagagtcctgaggactgtaggacagccgggaaggtgtgcacgccgctggtcagggcgcctgagttccacgacaccgtcaccggttcggggaagtagtccttgaccaggcagcccagggccgctgtgcccccagaggtgctcttggaggagggtgccagggggaagaccgatgggcccttggtggaggctgaggagacggtgaccgtggtccctttgccccagacatccatgtagtagtagtagtagtcccgagggaccactactgtccgctgttttcgcacagtaatatacggccgtgtcctcggctctcaggctgctcaggtacatataggctgtgctcgtggattcgtccgcggtaatcgtgactctgccctggaagttctgtgcgtagtttgttgcgccagatacagggatgatctctcccatccactcaagccctcgtccaggggccagtcgcacccagttgatcgcaaagctcctgaaactgcctccagaagccttgcaggagaccttcaccgaggacccaggcttcttcacctcagccccagattgcaccagctgcacctgggactggacacctgtagctgctgccaccacaaagaggaacctccaggtccagtccatggtgatgagctgtgctcccaggacgaaatcgtcgaaccggga

SEQ ID NO: 521 - DNA, 431 bp, Homo sapiens
accaggaatacaaagatgagtttgagcatcatcctttcgggaaatgtaaatacctaaagcaaaggattctagggcaactgtttttcttccccattatcaactccataaagagtcttttctgacttctttttcaattgtcccctcctggccttttaataacatagatatgctgggtatctgtttatgttctatatgtgtacttagactttgtttagaaaagagtaagatttttccacctccaagaaccagtgatcactcccttgagggctctgtcacccctgtggagaatgcagcacggtcaggcatgtaaaagggtctcttaccgggtcctctttcaggtgggggacttagattagtagataatccttcctgggccacgggcctcatgactggtcagtagtgttgccagatttcacaaactgtatatatag

SEQ ID NO: 522 - DNA, 971 bp, Homo sapiens
tttcgtgctgacagggccgcatcggcttaccccaccttactttatctgtacgcgcctaagctgctgcagctggcacccggttgcgctcggcgaagagggctgggggcgggagatgacggtggtcttttccctgcttggcaccctgcgagcaccatctccctttttctcgccactccaaggttgcagacgaagcatagatctggttggagttggagggtgagagaaaatgaattctaatttacctgcagagaacttatccattgcagtcaatatgaccaagactttgcctacagcagtaacgcatggatttaattccactaatgacccaccttcaatgtcaattacaaggctttttccagccttactggaatgctttgtcattgtcctttgtggctacatagcaggaagggccaatgtcataacatcaacccaggccaaaggactaggaaattttgtctccagatttgcacttccagctttattattcaaaaacatggttgtacttaatttttccaatgtggactgggccttcctatatagtatcttaattgccaaagcttctgtatttttcattgtatgtgtattaaccttattggttgccagtcctgatagtcgatttagcaaagctggactattccctatttttgctacacaaagtaatgactttgcattgggataccctataggtaagttaatttttatttttcaagtgtttaaaaaattcaattttaatttatttaggcatttgttagtaacagattcttactctcatatctaagaagtttttcatttttttctcaaatatgtcttaggatgaatcatagtttttcctaaacttcagagtttgaggatcctttaaacatctacctaaaataaacgggcatattctaataaccccctgtgaacaggcccaaattggaatttttttcttcccgggaagcacatatgaaaagaagcttatattttttaga

SEQ ID NO: 523 - DNA, 447 bp, Homo sapiens
ctgccttgcagcctgtgtgggcccaggttcttgcttcatcccagccatagtgggagccaccagcttgggggagcttctgttccatctgcttggctcttagcatgtggttgggacaagctttctgggcctggctaagttttatgaacagatggcacagcaaattcctgatggttaggtcaagaggagaatgtggtgcccagcgccaacttctgtgtgtgtttgttttcagagactccctacgggaggggatgccccgcaggaacatggtaagtagtgaggcgcatggttgcctcttgagaacggctgtcttttatgctacctacccctgtacaagttatgcgaaggaaaccaagccatctgcatgtttatttcctctgctcataataggaaaatggatgttatggagcttcaagaattgagctacccaccgaaccctaatgggtaagc

SEQ ID NO: 524 - DNA, 713 bp, Homo sapiens
ggcacgagcgggaaccacgcacggttatgagctcatggtttctgagggccgggcatggcctcatctgggtcctcttcttcaggattggtcaggctgcagtcggagtgtcagctgggcctggggggtcacccaaggcccacctggggagagtggcttcccagcaccctcatggggcagagagcagggcctgcctccttgcacgtggcttgcctaaggccctgagctccatgctggctgttgactgcaggccacgctcagggcctctccatcgggcggctcacatcatggcagcaagcctcatcagcaagccagtgagagggtgcctatccgaggatgatattccatcacctctgtcagattctgcttactagtcagtccccaggcccaggccactcgcaaggggaggacattacaggaggcgtgagtataggtggtgtgatctgtggggaccggcgcataggctgcccaccacatggggttaaaacctataaaacttcgaagctgaatttaattattttcgaacactaggaaataaataaggatcgctgtttctggccttcccagaacactatagggtgggattggatactatattcccccttaattttgtaaaaggggaaagcatgccctttcgatgccaacaattcacggggccttacagggaaaccttccaaccccccacgggagggcttttacttcccatccggtgcgcg

SEQ ID NO: 525 - DNA, 703 bp, Homo sapiens
ctctggcagacgagcataagaatccacattttaaacaagcattccaggtgattctgatgcaaggtgatttggggtcttgaagcctcacacttacagaaactgctctcttttgcatttatgaacctggctgttgaaggcttcagatcacatgcttggggatggtagatactagtggggatcatctgactccagactgggaatcttctcgttacaggatgaccccaatcacttaggtttacttctggatcttgataattccttgatagtcctcttttactgatgtctcttacggcccttaagaaggcagagaaggggttaactgaggccacagaatagagagagtgaaggaactgaagggtcattttacagagtgactggggtgtggcccagtcctccagtaggtgcccagagccagtccaaaattagaatggggtgggattcaaaactgcttttcctattcacttgcctttcatgtgtaaccacatgcagtgtgtcaacatgctttcaggcgccattaggcagcagcagttttgctccctctgggatccatgggaccttggaatttcctgtggtgcgaggcgcccacaaaaactttttgcctatggggcctatgtacctctttccaatcaccgctggtcaaccccttaccctctttgtaaaaacacaaagcgcggggcggaattaacccgggggaaaccccccc

SEQ ID NO: 526 - DNA, 554 bp, Homo sapiens
attcagcctccagagcaccagcactggcactggcactggcacacgctatggcaaatgaagtgcaagacctgctctcccctcggaaagggggacatcctcctgcagtaaaagctggaggaatgagaatttccaaaaaacaagaaattggcaccttggaaagacataccaaaaaaacaggattcgagaaaacaagtgccattgcaaatgttgccaaaatacagacaccggatgccctgaatgacgcactggagaagctcaactataaatttccagcaacagtgcacatggcacatcaaaaacccacacctgctctggaaaaggttgttccactgaaaaggatctacattattcagcagcctcgaaaatgttaagcctggatttaaaacacagccgtctggccagctgcctcgaatatctgacagcttagcaaaaagggccaaagctttccataggcgtgctgcacttgcttggtaaattaaacagcttttgtatcttcccctttgactttaggtaataaagcatccaaacttgtaaaaaaaaaaaaaaagtcgacg

SEQ ID NO: 527 - DNA, 385 bp, Homo sapiens
  misc_feature (1)...(385): n = a,t,c or g
gttatttacctttagtgaattccatcttctgaaaacaatgcttttgtgggtcttcttgcaactgaactacaagattcaggcaattccgacttatgaaaccgtgatgacattttttaagagctttcctgagaactgttgctttctggaccgggacataggacagagcttgaggccgctcttcctctgcttgcgtctgcacggcatcaccaaaggcaaggatnctgaggtgctgcggcaccttaacttcttcccagagtcatggctcgaccaggttacagtcaaccattaccacgcactggagaatgggggcgacatggtccacctgaaagatcttaacacccaggctgtgagatttgggctgctctttaaccaggagaatacaact

SEQ ID NO: 528 - DNA, 1375 bp, Homo sapiens
atgttgtattgggtggttatacatttcggcgcaagggggcccggagggcgccgaaaacggcgaacgacaaacggggagggccggaatgcggcaaggcacgccgggaaagagggaaacccgcgaaagcccacgggcaacgcccaaacccccatggacccaaggaaacgtaaaaagggaagtctgaccccgggaccaaatagacgccaacaggaaagcgagggcgcaaggagacaatcgcgacggggagagaacgggagcgaagcagcccagagccccagccggggaacggaacggaaggcaaccaagagggtgaaaagaaagcaagacgtcaccgggaatgacccacatagcccttctttgtcttcgggaggtcccatccataaagccaacacttccggaagattaaaggtgtcggacagggggacagctgagaggagaggaggatttcttgccaggtggagagtcttcaccgtctgttgggtgcaggcctgtgtctgtcctggaaagatgctagcaatgggggcgctggcaggattctggatcctctgcctcctcacttatggttacctgtcctggggccaggccttagaagaggaggaagaaggggccttactagctcaagctggagagaaactagagcccagcacaacttccacctcccagccccatctcattttcatcctagcggatgatcagggatttagagatgtgggttaccacggatctgagattaaaacacctactcttgacaagctcgctgccgaaggagttaaactggagaactactatgtccagcctatttgcacaccatccaggagtcagtttattactggaaagtatcagatacacaccggacttcaacattctatcataagacctacccaacccaactgtttacctctggacaatgccaccctacctcagaaactgaaggaggttggatattcaacgcatatggtcggaaaatggcacttgggtttttacagaaaagaatgcatgcccaccagaagaggatttgataccttttttggttcccttttgggaagtggggattactatacacactacaaatgtgacagtcctgggatgtgtggctatgacttgtatgaaaacgacaatgctgcctgggactatgacaatggcatatactccacacagatgtacactcagagagtacagcaaatcttagcttcccataaccccacaaagcctatatttttatatattgcctatcaagctgttcattcaccactgcaagctcctggcaggtatttcgaacactaccgatccattatcaacataaacaggaggagatatgctgccatgctttcctgcttagatgaagcaatcaacaacgtgacattggctctaaaag

SEQ ID NO: 529 - DNA, 1787 bp, Homo sapiens
tagggagaagtgccaacatatttgcagtttattttcaaatggttcagaggctgtctgtgtacatgagaagacaaagataaggcaaatgcagcaaaattgtaataattggtgaatccaggtgaagggactatggctggtctttgtacttttttttccaacttttctcgtaggtttaaaattttcaaaataaaaaatgggaaatactttaaaaattgtaatcaaagacattagtacagaaactttcataatgtattttatttttacagtaaaattaatttatgtaaattgatagaattttactaatttcactcccaagttacattaaaaggcttacatatgtttgataatagcatatgtaaactagaactctgaatgatatccattggtcataatacgtactatgtagcggtaatggtgacttttgtgattgcacaagtctagagatgccccaaatgacattgacttagacatctggttattctaaggctgaaactgaagttgaatagaaggttttagtcaaatactgagatgaaaactgaggcagtcctggcgggggggagtgagtgtgtgtgtatatatacacacatagacatcatgcttctaaacatttacagaaagaaagggtagattatctacaaaaaaataagaatcagactgatatgagatcttacaaacctaacccccttctctttcctaaactccagattctcatatttctgacttcctatttgatatttacacttcgatatttaccaggagtcttcaacattttgttcaaaacagtactcttggttttcttcctccaagactactccttactcatatcagcaaatagcagctcttttcaagtgctcagtgtaaaaacctacaattaatccttgatttctctttcagtcagcctatactaaatcaatttcatttaaaatatctcggctactactctgcatctccactgctaccatcggcctctccagtcacattctccaagagcactctatctcatttaaaagacaaaatctctgcagtggcctgtgatgctccttaatggcctacataatccagccctcaagcacctccgtgatctctgtaaaactttcccttggtcactgtgcttcagccacattaaccagcttgcatatttctcacattcaccaagcttgttcctgccttggggcctttgtacttaccatgttctgttctgagaatactctgcctcaagatatcctacaactatcttactgtattcagctctctgctcaagtattaactgatgaaacctgtcatccctactccactccatgttctgctttacttaacagcaattgcacatatggccccctgaataatatacatttagtcacttatttttacttatctgctaattaaaatgtagactttttctattctgtttactgctgtattcccagcatgttttatccgaatgtgcagtggtttcttttcttctcccttatcgtgggaagtgatgtgcacaaatacacataatggagcctgaatgtcatattgctttcatacctgtgtgaattttggtaagaaaggaaaagtagcgattgacaggtaatataattacattaagtcactctcatagttagctgtttattgctttcctgctcttattctcagtccccaggaccaaatgttgaccactaccttcccccacatataattaggttatttaccgaacgccatgcaggtggctgttaaaaggaagatatatacttacaatataaacacaacttttccctgttgtctttctgtctcacacgaaa

SEQ ID NO: 530 - DNA, 611 bp, Homo sapiens
catttttttgtgttgtcagtaatttccttataaagatagtaattttctctaaatcaaatcttatcatgacttctaacattctgtaaaataatttgagagtactagttaactaattcacaaactttaaattagtagtttattttcagttaagcacacaagaaagaaatatacagtctatctataatgaaatcttagttgactagatgggttgtggtgtcttaaaaattcccataactgatcacatggcttttaaaataggaagtctgagatttttttgttttcctcaactatatcctttttaacaagttctattttatggatctttatgtagtgattttttggttagtatacatattctctacttacataatcacatatataaaaggtaatgtgggactgtgttttcaaatcttatttcagctaagttttgagagaagaccaaaatcagtaaggtaagctgagaactaagagtagaaagtttaaactagagcaggggccaagtttaggagcagccacaacttttcttgcacatcaacttagttgtaacaatttagtttgaaagaaaatctggaacataatactcagtttgtaaaattgaagttggtagaatt

SEQ ID NO: 531 - DNA, 968 bp, Homo sapiens; identical to SEQ ID NO: 59

SEQ ID NO: 532 - DNA, 729 bp, Homo sapiens
  misc_feature (1)...(729): n = a,t,c or g
agtgattatcctaactgctataggagttagtgatgagatcagcccatagagctcagaaggctattctttgaggaaccccaataccagagatttaataatagagacatgaataggaaagagatgactgcattaaaatgaaaaacttgttgatggtccatctgtggggaatatgcacattatatcttgagttttctgctgtgtctgccatttccttcttgaatcacattagtgttaagacctatttcccaaacagctcctcattttacagagcaaccccaatggtccttgacttcatccttcactaacaaaatcaaattcaagccaattacctgaagggaacaaagctttacaggtatactttaacttacaaaattaccataattggccaagggtggtggcttacatctgtaatcccaatactttgggaggctgaggcaggcagattaacttgagctcaggactttcaagaaaagcctagggaagataatgagacctcgtcttctatacaaataccaaaattagcttggcatgggcgcttaaacctgtccttcttaactactcaagaggctgaggtgggaagaatacccttggcccccgggaggggcaggggttcctgggggaaattgccctttggccttccaccccgggggcaaaaaaaagggaaaccctgtcttccccncanaagaanacaccccacaaaacagcggggggtatttttttttttgggcc

SEQ ID NO: 533 - DNA, 774 bp, Homo sapiens
tctttagtatatataatattaaaaatggctatatatggaattctatctgagaattattatatggttaaattcaaatcctggctctcttcctttgtcttagtagatgggtccttcttttattataactagagttttaagttctcttttattagggcatttgaataaaaaacaatcattgtagaagtataattaattaataactagctatcttatgtcatcttgagggaatcatgctgggatggcaaatctggagactgaggccacaactcctctccttccatacacaggacagatgtcactggtctatcacatctcaatgctctaagccagagtcccaagaatccttcttaagcaccatccatctattagagggagcacaggaggggacacccactgaatgactattcaaacaatttcttaaagaatatgcaatgcataataaggtgttgagatacagaatgctactttactaaaatactacagtgtaagaatgtatagaaaaaagcacatgctttggagacttaaaggcctgggtatgaatcatggctctgacattaacaaacctcacctcctctttaaaagagtaataatgattggtatctcattgagcttcgtaaactaaaaaactacagagtaagaagggggggcccttacaaaagctttggagggggacaaacctggcgaggaatcatggctctgtctttatctcccatcaccgcctctctaaaagagtaaaaatgagtgtttggcatggaactttgtcttaagaaagaa

SEQ ID NO: 534 - DNA, 770 bp, Homo sapiens
  misc_feature (1)...(770): n = a,t,c or g
aaaagaaggtaataaattaaaaagatcatttacagagatagcctggggtgataagagtttaaagttttgatctttttgttcatcttaaaaaaattatgatatatgtattctctctagctcacagtcttctcattttcaaaatgagagaaacagggatactattatgtttcttatcagcattaaattatataacccttgtgacatcccaaaaattgattctatccaaaaaaatgcatgttaatcattatttgccaaaaaagacaatctccaaatttctttattttgtaaaagtattccatgacctagtcctatagagcaggtgaatattggagattgttttctctgtaactttactatcatctacctatcttcgtattttggtgagagatcatgaaaccctctatcaaactctctttatgcagtaagttataacaaattagcactggcttataaagatatatcaaattagagtaaaatgcaactgaaaatatcataaatcattcggtaattaatgttttcttaaattcttggggnaagtacaagagaagaaattggagatgtgcagactttaaatgacctaaacagtcttacacaggagtttttgcagtatggtaagaaggaggtggctacttatgttttcaaaaagcacatgacctcatgaaaagtatgcaaggctatactgtcgacggtagaaaaacgagagacagagaataatttaaagaaccttcccatgttaggcgtgaaaatgaaaaggcttaaatttaggtgcc

SEQ ID NO: 535 - DNA, 459 bp, Homo sapiens
tgattcaactgattccttgaaataaaggtagtcagacctcgcggtatgatggagatgaagcaactgatttactggttttctctatttttctgctgttcgtgttgtcatttaaacagacatggaaaccgtctgcacacgacagagatctttccgagcctttttcatctagtgtgctgtgctgacccgctcccctggatgcctgcacactcatttggttctcccttttggtcacttttttccacttaccctggcagaaattcacgtggctgtcagtagtaattcagtgacctgctttcaaaaaatgttataaattaagcagcttttctgtgtatagcttttgggttgaactgagaagggctaagtgaagggagaagctatgttgagctcagagtcagaatgccctgccccagacattttgagatgtgaatttttcatttgttttgtttgtcgacgcggccg

SEQ ID NO: 536 - DNA, 484 bp, Homo sapiens
  misc_feature (1)...(484): n = a,t,c or g
aggagtgcccaggggnnccaaactgaaatcccctacntntctacgcacanncnggnacgagggagnaggtacgagaatacagaatacggntgttttctattaagcacacacattacagagatttgcaaaaatgttacaatgctgctcttctcactaaactttttcttttggaaaatagtcatgtttcataaaaatgtaatatttatattaacatgtaatgggtttattattgttacttttaaatggattgataaatttattttaaatatttctattttaatttctaacacagtaaatgttaatagccataatccacataaacaaaagttctttggggatctcagtaatttttaacagtgtaaaggggtcctgagaccaaaaagtttgagaactgctgcaatcaactataaagagtaagtttgccctgaactgcattaactggtatactttttctctgtctttgatcaataagggcttaaatatg

SEQ ID NO: 537 - DNA, 727 bp, Homo sapiens
gtttaaaatcatcaatgacatcaaacaacagcaaaacttcttacaaaaacaagaagagccagtggtgtctgagcatccgcattacgtccttcccttctgcctgtgggtactgaatcagttacctgtatgagaccgtttgtgaagctccaagttgcttgggtgtttaaaaggtttcccgcataattcacacgcgtattgtctctgggactgaagtgtctgggactggtcttccagggcagccgggtcttcaggcctctccgtctcactaatgcaattaaaattctcacaactgacgacttcttcactttctttttcttcagcactttggctgctagctttctctagggtatttttactagcagattccaacctctttgtcaaaccatcatctgacttgggttcagatacttgctctgcggatttctgtgacttcaggaaattgagcttcttcagatgaatggcctttttgagcctcatctgcttgacaggttgttggcatgtggcgtctgactcagggtgtggggcagagtcattcacaggtgtaaaagtttctgagtttgtaatagtaatttggctgtttgaaaggcagttctgtgcagctgccatctgaagtatcaggagcttgttttgagatttcacctgcggagtgatgacgattaactgatggtgaagcatgcggatgcgattcatccaacgttttgttctgctgtgcatctgctgaacattc

SEQ ID NO: 538 - DNA, 3197 bp, Homo sapiens
agatgccggaccgctccttcccagctcctccccgtgctcgctaacacagcacggccgcctgcagtctcctctctgggagatcgcgcgggcctaagatgtgtcctggggcactgtgggtggccctgcccctgctgtccctgctggctggctccctacaggggaagccactgcagagctggggacgagggtctgctgggggaaacgcccacagcccactgggggtgcctggaggtgggctgcctgagcacaccttcaacctgaagatgtttctggagaacgtgaaggtggatttcctgcgcagccttaacctgagtggggtcccttcgcaggacaaaaccagggtggagccgccgcagtacatgattgacctgtacaacaggtacacgtccgataagtcgactacgccagcgtccaacattgtgcggagcttcagcatggaagatgccatctccataactgccacagaggacttccccttccagaagcacatcttgctcttcaacatctccattcctaggcatgagcagatcaccagagctgagctccgactctatgtctcctgtcaaaatcacgtggacccctctcatgacctgaaaggaagcgtggtcatttatgatgttctggatggaacagatgcctgggatagtgctacagagaccaagaccttcctggtgtcccaggacattcaggatgagggctgggagaccttggaagtgtccagcgccgtgaagcgctgggtccggtccgactccaccaagagcaaaaataagctggaagtgactgtggagagccacaggaagggctgcgacacgctggacatcagtgtccccccaggttccagaaacctgcccttctttgttgtcttctccaatgaccacagcagtgggaccaaggagaccaggctggagctgagggagatgatcagccatgaacaagagagcgtgctcaagaagctgtccaaggacggctccacagaggcaggtgagagcagtcacgaggaggacacggatggccacgtggctgcggggtcgactttagccaggcggaaaaggagcgccggggctggcagccactgtcaaaagacctccctgcgggtaaacttcgaggacatcggctgggacagctggatcattgcacccaaggagtatgaagcctacgagtgtaagggcggctgcttcttccccttggctgacgatgtgacgccgacgaaacacgctatcgtgcagaccctggtgcatctcaagttccccacaaaggtgggcaaggcctgctgtgtgcccaccaaactgagccccatctccgtcctctacaaggatgacatgggggtgcccaccctcaagtaccattacgagggcatgagcgtggcagagtgtgggtgcaggtagtatctgcctgcggggctggggaggcaggccaaaggggctccacatgagaggtcctgcatgcccctgggcacaacaaggactgattcaatctgcatgccagcctggaggaggaaagggagcctgctctccctccccacaccccacccaaagcatacaccgctgagctcaactgccagggaaggctaaggaaatggggatttgagcacaacaggaaagcctgggagggttgttgggatgcaaggaggtgatgaaaaggagacagggggaaaaataatccatagtcagcagaaaacaacagcagtgagccagaggagcacaggcgggcaggtcactgcagagactgatggaagttagagaggtggaggaggccagctcgctccaaaacccttggggagtagagggaaggagcaggccgcgtgtcacacccatcattgtatgttatttcccacaacccagttggaggggcatggcttccaatttagagacataaaacacaggcagatcaagtagcattgatcaatggcatgattccaactcagatttgtgggacaccaaagcccaggatcttcccaagtgccctgctgcagtttagcaggtcctctccagctaaagagcagtgagacattgggagcccaggagtgttgaggccaggccaggctgaggcccatcagtcacaggtgtgactgggctgcttgtcacacacagggcgtggtctggccactgttgccagtgctcactcagcggccaaatgctttttaatatgacccctgaggcactgaaaaataaccccaggccaactgcaggatagagagagaggtcaggacagcagccctgtgggctgcatgatacactgtggctggagttattgtgaccccctggtgcagtgctcccacggccagtggtgcacacagggccattcactgtccatagactgaaaccatgtgaccatttgagagggccgggcacactttcccctgagggatggggcagcctgtggccagcacctctgcagttactctgcatagccagctcaccagcatgccatgcccagggtgccccccagtgacaacctcatgggagacgggcctggatttgaatttgttggaattaaatgtgctctggctttggtctttgaaacatatctatttttattccttggtgacatgtccttaagtgacaagactccagccttcctgggcgaggcctctccagcctcggaagagctgcagtccttatcggcgatcactggctctgcctgcatttgccggctctcttgagtcacgtgcatcccagcaccccgcctgggctcggactgtgggaccagactcagcctccccgaacacaagggaagataaggcttccatttgctctgtgtttcaccctctcctctgtctctccaggccacacatggaacggggcggtatgaggaagagtctgaaagtggtgaagagtgcacctatggccctctgacctccagccagagcagggcctaggggaggcttagagaggccagggcctctccccgtggttgaagctcccatttatttaagaaaaagtggggggtggggaaaacgttatgttaaatgtttacatggaaccaatgaacaactttaacacacaaatacaacgaaacattcttgtttaattactggcgttatagaaaatatgaattcctgctacatgccgggcagtgtagtgttacaatgctattccaagttgggtgttgagcatcttctttcagtcctggtggtgtgcttctgtgcctgcttgaaaatttcactaggaaataaagtcaaatgtctaaaaaaaaaa

SEQ ID NO: 539 - DNA, 444 bp, Homo sapiens
gacttcggcacgagaatagctgagtttacaaagatgcattaaatagaaatagaacgcaaaggaaatcccagccattaccatgaacaaaatggtaagttacttctactagaactttactgactttaagctagagagaaagagaaagagagaggtaaaacaaaaatcaaaaaggaaaaggctcagatcatgttcggcatgatcaagaggagggtcagaagagctgtttttgtgggccgcaccgtgctctgtggatcttgtaactctgggattattatgcaccgtggcaagactccacccctgaagatggtctgccgatttgaagaatcattttcttgcttatttttaaactcttaaagacagggaaaaagactgaaggagcctaaatgctgtggtttcctcaaaccattattgttgtaaatcctatgggtcctgaagtaactcact

SEQ ID NO: 540 - DNA, 459 bp, Homo sapiens
  misc_feature (1)...(459): n = a,t,c or g
ataacagggcaagtcacagccatgggattccttttccttctggattctgccctcatgcagacttgggttacagtaatagatgtaagtctgcatcatgtagagatcaaagccccaagaataaggctcatgtggtccctacccttgaggagacaaaaatatacgatgtagatggacagctgcattatgcacacagatccatttcaatataacatggtgggctactctgggaacactcctgctccacaaggagcagtataaaaaaataaattaatcaaattttaaaaaagcaacatggtagatcctgggcgcttagagagtactgctcaagtgctatgagaacacttgggcagagatatctacccagacatgggagtgacgtggttgagaaatctgatcctacactgctaacacctctgtctggagaagttctcgtgccgaagtcttcagagcggttctatn

SEQ ID NO: 541 - DNA, 1266 bp, Homo sapiens
caccagatgtattgtgtcctaccatgaattcactccatgctagccacattggcctgtatggctattccttggacacacctaggatgttcttgcctcttagcttgcctacctttctctcatcatttgggcctcagcgaggatatcatctcctcagagaagccttctgtgaccatgctatctaaaatactccagcacttcagtcaccctttatcccattactctgctttttcagaaacattggtgctccctgaaacgtatttgtttacttgcttagcgtcttttctcccgcactaccatgtaagcttcttgagggttagggaccttgttagggataaccactgtatccttagagtgtgacacatagtaggttctcaatacatatttttgaaactctaccctgatgcaaaagagatatcaaataattatagtttttgcattataaatgtctttggtgaaatccctggcacaaaactaataataaagaaataaacagataatggtgagttctgggcctgcaaacctaactctttaaagcagtcacagtaaatgtgtcattggatccatagaacttgggaagtcagcatattttattgggaaaagcatgaacttcaaagtaaaacttatggtcaaatctcattactggtgcgttcttaagtcatttaacctttgagccacaaggtacacaaatgtgaaattagaggaataatagtgactccataagaccctcaagaaaaggaaataaggtattgtagcccgatgatccttatcacatggctaacaaattagggggtctaaaattctggtatgggcatacccggaaacacgtcacgcatgtaggggcctactaagaaaagaggttccttgagtcgggaccagggacgttatgcgaaatggcgggaactggaggccgcggggatgggccacgtcgagcattcgccggcatcggggattgggggaacccgggcggttcgtgcgcggggggcgggaacggggggcgcgtgagcgaagagggagcatcggcggctacggcgcgcaaccgggcgagcagcaccggcagtggcgcaatatacgcggagcagctcccatgtaacggcgcagtttgtgcgcatccggcggaagtagggcgaagaccacgtcggtgcgcgggaaactcgcgcgcactcgccggcgacaacggcacgggcaccgccggactagggggccaccgcgcggtgcacctgctggctcgtcggcgagaacgcgggcggataattcgcggaccgagcc

SEQ ID NO: 542 - DNA, 647 bp, Homo sapiens
ccacgcacacgtttctgttcgatatacagatgcttcttgactcacgatagagttacatctcagtaaacctgtaatgaattaaagatgcatacacctcatctaccaaatatcatagtgtattttatcctactctacatatgctcacaatacttatatttacttacaattaggcataatcatctaacacaaagcctattttataataaattattgagtgtcttgtaatttattgaatgctgtacgttgtgacaaaattgcaatggtttggcaccatcataaatttggaaaatcatttagtggaaccttcataagttgggaactgtttgtatacctataagtggaattattcggtcatagagtatgcgtatcttcaacttgagtagatttgcaaatggttttccaaagtggctataccaggttatatcaatttacattctaaccagcagtgtttaagagttctggtgctccacatctcaaacatatatatatatgtgtatagagggagagagagagggagagcgagagccacagagagcgcatgttttcatatgttcctgctaactctttcttgcagaatgactgatcattttttctaattgatatggaagatttctttgtatatctcaaatacaaaaacctttatgagt

SEQ ID NO: 543 - DNA, 447 bp, Homo sapiens
ctagagagcgtggggaattccaggattgcccacttgggaccctgactatgaagggtcaagatagcccattctgccccagcactcagagccctattaccaaggcccctactccaagaatccaccatcaaaaccggggccctgccagtgccttcccagtgttcaggcctagggaagaatagccccattatgcctgttactcctgatccttctgcagtctctctctttgtgaccccatggcctttgctgctatgtctgccctggccccacagagtgccaggtcagagccaccctggcctacatagcagggccccggttcacaggctaaaacctgggcctcctgccaggctgcaactcccagctgcacaccgcaacctgagacatctcagcatattctaggaactagtaatggggacgcttccgactcgctggggaagggagatgagggcc

SEQ ID NO: 544 - DNA, 446 bp, Homo sapiens
aaaacatcatgtcatggtatacttgtcagtgtctcttctttctcagcaacacattaaggaatggtgctacttcttgccattggtattgtagccctgatgacatgcagatggttgatttcagctcaacatacgaaaggattttcaggccatttgtgttcaagataaaagggcctgacagctttaggatagacatgagccccatccctgaagacatttaatcacaatctagacaagctcttgttgtaaatgagctcaagtatcagatttggaagtgaatgatcttttacatttttgtcaagcttgaggttcgtgaacttggatccaacctcttattttttgcagataagaaaacaaggatcacaccagttgagagatttctccgaagtcagacatctcattagagctagagaggccagactagcatgtctcccatgatccagtctgaa

SEQ ID NO: 545 - DNA, 711 bp, Homo sapiens
cggacgcgtgggcgggcaagatggcagcggcgctgcgcgtgcgttgttgagtgttcgggacgccggcctgcaggcgccatggtcttcctcaccgcgcagctctggctgcggaatcgcgtcaccgaccgctactttcggatccaggaggtgctgaagcacgccaggcacttccggggaaggaaaaatcgctgctacaggttggcggtcagaaccgtgattcgagcctttgtgaaatgcaccaaagcccgatacctgaagaaaaagaacatgaggaccctctggattaatcgaattacagctgctagccaggaacatggactgaagtatccagcgctcattgggaatttagttaagtgccaggtggagctcaacaggaaagtcctagcggatctggccatctacgagccaaagactttcaaatctttggctgccttggccagtaggaggcgacacgaaggatttgctgctgccttgggggatgggaaggaacctgaaggcattttttccagagtggtgcagtaccactgaggactgttgctgtattgattaggaaaagagacagagtaatttgcagtttgtttgatttatacttttgtttatctacaacccaataacagacatgagggatggccctgtctctctgggacagagcctcaaagatgatgtccatgttttgtgtgaatgaaactcaaacactcttcaaaaaaaaaa

SEQ ID NO: 546 - DNA, 1076 bp, Homo sapiens
tattactgcgagatgacgacagaacggggcgccggaagtggaagaccaggcagcccagctgaaggcagtaagctcggctcacagtcgcaggagagttctggggtacacgggcaaaggggcttgagaaggcccggaggcgaagccgaagagaagcaactgtgccccggagaagagaagctcgcccattccagactgggaaccagctttcagtgaagatggcagggccagaactgttgctcgactccaacatccgcctctgggtggtcctacccatcgttatcatcactttcttcgtaggcatgatccgccactacgtgtccatcctgctgcagagcgacaagaagctcacccaggaacaagtatctgacagtcaagtcctaattcgaagcagagtcctcagggaaaatggaaaatacattcccaaacagtctttcttgacacgaaaatattatttcaacaacccagaggatggatttttcaaaaaaactaaacggaaggtagtgccaccttctcctatgactgatcctactatgttgacagacatgatgaaagggaatgtaacaaatgtcctccctatgattcttattggtggatggatcaacatgacattctcaggctttgtcacaaccaaggtcccatttccactgaccctccgttttaagcctatgttacagcaaggaatcgagctactcacattagatgcatcctgggtgagttctgcatccctgggtacttccccaatggtatttgggcttcggagcatttactcctctgattctgggccaagataatgccgctgaccaatcacgaatgatgcaggagcagatgacgggagcagccgatggccatgcccgcagacacaaacaaagctttcaaggtatactccttcacctttcaaagctgcagcaatgctctgaaaggtgttaccaagagctattttaaaaatagcttccttgaagggagtgttgtgtggttccatcggttttaatttaaacttagtaaaaacattagtttacacgtctctctttcctgagacagaatcatctattaagtaaatggaaattcttggtgctttt

SEQ ID NO: 547 - DNA, 749 bp, Homo sapiens
taaaaatgttgaaaataaggcttacttttattatttgaatatggtaattatgtaattatccttttaatatgttaaggttatattctgtgccttagagtatgctaagcactttatacataattatcttatttaagcctcgtagaaatcttatgagcaaaatgttactcggtacacttaaagtacaggtaactgaggcttagagatgtaaaataatttgtccaccacagtgcttttaaaagatgctcgtaaccactatattgtaatttcaaaccctgattccattaatgctttttgttgtgttgcctttactgataattgtgttcaatattcccatgagggaggcagtctttgactttttatttatgataaagattattaaagtgcttaaagttttttattgtatagcgtgttttatcatcaaacaggctttagttttttaaggtaaactgaccataaataataaaaggtgatgggtttatgacacttgggtttgagagaactttaattggagcaatatttcaagaaaatccttcttactgtttttcgaaactggtgaggggcagagatgccccaagaacacttctaggtttattggttcgaaagaaaggactaccgggagtggttttaggcgcccctcgggcaagaattaataagggcaagaattcccggaagatttctaagggtttgggccggggaccggctgggggaacgagaccccccccggcccttgtggttgcaacctgccccct

SEQ ID NO: 548 - DNA, 783 bp, Homo sapiens
tccctgcggtggaattcgcacacacacacgtagtacaaagaaatactatcagtgaatggaggcaagtcattgagttctgtaatcttgatagtccagagaaagggatgaatctgccagatcagaggagctcctgatgtcttcttcatcaggttaaggatattttcttttatatctaatttaattcatctaagaacgactcattaaattacgtataattctttactacataaatgaagttccctcttattcctattttactttttttttaaattaggaatggttacttattttatcaaatgctttcattatgaggtttcttttcttctttggtttgctgttgtcaggaatgatgtagacaggccagtctccctgtcactcttctcttcctatagtttattctcaacatatccagacacatgtcccttgttcaaactccccacccacttactgtgttgtttagaggaaatataaatgtccttattataactgacaaggccctaccctgttcaatcttactacttttctgcctaatctacttctctctctctatctaactcatcctactcagtcatcttggctttcttgatgttcctggaatatactggacatgttccctttacagagccttttcagttgctcgtctccttacctgggatgtatttccatcccacatcaccacacttagttagatccctcacagacttcagatctttactcaaaggtcaccttttttatgagtccttccttgggcacccttttctaaaggtcatcccatcttgcctt

SEQ ID NO: 549 - DNA, 429 bp, Homo sapiens
ggtgaacattttctgagcttctttctagctcttacatgctgtggttctgcgaattctttgccttctcaaagatttcagaaaattaactctcattgagtggcattttctgactccgggaataaagcattttttttctaagattgttttcttaaaattagaagactgatgttgtattattaaaaacaaccaactcaccatgcttcagggtagagattcttttgtctattgctaatggaggatgttagagagaaggtcatggctgtacctattatgctgttctatttcagcctactctataaatctctggctttttttgaatcctattcttttgctgagtaccacccacctacttctgggagacaaggctgtgtgaaagacatcctcaaacgtctcatctggtttctcatccatctgcacctggatgctggg

SEQ ID NO: 550 - DNA, 882 bp, Homo sapiens
ggaattcttttgggaataggtaattatagtcacatggtttaaaattcaaaagttacaaggggatataaatgtctccctcccaccttgtccccagaggtggctgtttcgatcagagccttgtttctagacgtgtgtgtgtgtatgtgtacgcatgtgtgtgtatgcacaagtagttttgggttctcttttcttggtggtgtacagaagggtagtcaaagcccgactcatgatccctaactcgagtcttttaatgggattgtgtcctaactgcaaaacccgcctcaccaactttgttataaactccccgggtttatagggacagtcatctactgtcccttcctaacagcatggtgcagaaacactccataaatgagtcttgtgttgaatcagattgaattaagtgagaaaggaatggcggtgaaaaatgtggctttagtcatcacatgggcctacgggtttgtgaaagtaacattgagtctccttgtgttctgtgtgtactgcatgtatgtcatcttgcatctaaggatgtatattacccataaaggagcatgcagacacatgagtgcatcttggcttgccactaactgcctgtggccttggggctgtcactcaacttttcatctggaaattgagaataataatactattatccttctggaattgtgtgcataaatgcacagggcctggctcataaaaagtactcagtgagggccaggcgcggtggcgcacgcctgtaatcccagcactttgggaggccgaggggtgcagattacgaggtcaagagatcgagaccatcctggctaacacggtgaaaccctgtctctactaaaaatacaaaaacaaaattagccgggcatggttgcggtgtgcctgtagtcccag

SEQ ID NO: 551 - DNA, 976 bp, Homo sapiens
  misc_feature (1)...(976): n = a,t,c or g
ctttttacatagatgatttcattaagtagtaaagaggtgcaatcagagtcttggtatttaatcagtcagatacttggagaggaataanaaagcttgccttcagtgatccttggattaggagtgacaaggtggactggagctccctctgaaggacagtgaacaacactgatctcttgtcctctgctccaaaacaggatgtgtggcaggttcctgcggcggctgctggcggaggagagccggcgctccacccccgtggggcgcctcttgcttcccgtgctcctgggattccgccttgtgctgctggctgccagtgggcctggagtctatggtgatgagcagagtgaattcgtgtgtcacacccagcagccgggctgcaaggctgcctgcttcgatgccttccaccccctctccccgctgcgtttctgggtcttccaggtcatcttggtggctgtacccagcgccctctatatgggtttcactctgtatcacgtgatctggcactgggaattatcaggaaaggggaaggaggaggagaccctgatccagggacgggagggcaacacagatgtcccaggggctggaagcctcaggctgctctgggcttatgtggctcagctgggggctcggcttgtcctggagggggcagccctggggttgcagtaccacctgtatgggttccagatgcccagctcctttgcatgtcgccgagaaccttgccttggtagtataacctgcaatctgtcccgcccctctgagaagaccattttcctaaagaccatgtttggagtcagcggtttctgtctcttgtttacttttttggagcttgtgcttctgggtttggggagatggtggaggacctggaagcacaaatcttcctcttctaaatacttcctaacttcagagagcaccagaagacacaagaaagcaaccgatagcctcccagtggtggaaaccaaagagcaatttcaagaagcag

SEQ ID NO: 552 - DNA, 1644 bp, Homo sapiens
aatcgcgggcaaagatggcggcggccaggtgttggaggcctttgctacgcggtccgaggctttcattgcacaccgcggctaatgccgccgccacggctacagaaacgacctgccaagacgtcgcggcgacccccgtcgcgcggtacccgccgattgtggcctccatgacagccgacagcaaagctgcacggctgcggcggatcgagcgctggcaggcgacggtgcacgctgcggagtcggtagacgagaagctgcgaatcctcaccaagatgcagtttatgaagtacatggtttacccgcagaccttcgcgctgaatgccgaccgctggtaccagtacttcaccaagaccgtgttcctgtcgggtctgccgccgcccccagcggagcccgagcccgagcccgaacccgaacctgaacctgcgctggacctcgcggcgctgcgtgcggtcgcctgcgactgcctgctgcaggagcacttctacctgcggcgcaggcggcgcgtgcaccgttacgaggagagcgaggtcatatctttgcccttcctggatcagctggtgtcaaccctcgtgggcctcctcagcccacacaacccggccctggccgctgccgccctcgattatagatgcccagttcatttttactgggtgcgtggtgaagaaattattcctcgtggtcatcgaagaggtcgaattgatgacttgcgataccagatagatgataaaccaaacaaccagattcgaatatccaagcaactcgcagagtttgtgccattggattattctgttcctatagaaatccccactataaaatgtaaaccagacaaacttccattattcaaacggcagtatgaaaaccacatatttgttggctcaaaaactgcagatccttgctgttacggtcacacccagtttcatctgttacctgacaaattaagaagggaaaggcttttgagacaaaactgtgctgatcagatagaagttgtttttagagctaatgctattgcaagcctttttgcttggactggagcacaagctatgtatcaaggattctggagtgaagcagatgttactcgaccttttgtctcccaggctgtgatcacagatggaaaatacttttcctttttctgctaccagctaaatactttggcactgactacacaagctgatcaaaataaccctcgtaaaaatatatgttggggtacacaaagtaagcctctttatgaaacaattgaggataatgatgtgaaaggttttaatgatgatgttctacttcagatagttcactttctactgaatagaccaaaagaagaaaaatcacagctgttggaaaactgaaaaagcatatttgattgagaactgtgggaatatttaaattttactgaaggaacaataatgatgagatttgtaactgtcaactattaaatacattgatttttgagacaaatatttcttatgtcaacctgttattagatctcttactctgctcaaattcatcactgaaagatttaattttagttaccttttgttgatttaaaaataattgcatttgtatattgctaactgataagacaaattgagttattgagctattaaatgcacattttaatataaatgcagaaatcccaaataaaatgctaacatactg

SEQ ID NO: 553 - DNA, 1094 bp, Homo sapiens
atcataatcaccataataaatacattatatatatatgcatcactccaaaaagttttcacatgtccctttgtaatacctccctcttctcctcccctcaacaatcacgctactggtttgtgtctttttgtagaatttaaatacatgaaattgttcatgcagtgtgatactttttttaaatcttaaatcttttctcagaataattcttttgagactcattcgtgtagtggaatgtaccaaatgtattatttttttattgtagagtggaatttattgtatgcatatatcataatgtgttttcatatttatctgttgatgaaaagtcgacttgtttttaatttttgctatcacaagtaaaacttctgaacacatttgtgtatgagtctgtatgtaggcacatactttcattttatttggtactaacaccaaggagtagaataattggatcttatggtaggtttatatttaactttttagaaaactgccacattattttccaaagttgttgttttttttcacattctcaacaccaatgcatgaagaagttcagttactctacatcctcattaatagttggtatggtcacatatttaaatttttgctctttttatagatcagggataatatctcatcagttttaaattgcatgtcacttataattaataatgttaagaatattttcatgggcttatttgccatccatatatcttcctggttattgcgtgcctgttttcttattattgaaaactttgagagtgtattatatatttcaaatacccatccatttatatatatgggattacacagatttttctcccagcccagcgtttggattttacttttcttaaccgggcctttaaataccaaaagctattatcattgatgcacttcatctcccccaccctaactttagtctctacttccttggccgacctactcaacgcatcagtttcaatcgactattcgctccgtgacacaaacgtcgctcttttactgtacgtggccagtcctctcagctcaatatagtgtcctaagtacctactctagtttcactgttcctatgcggccgccactatactctgtaccaccgcgtaact

SEQ ID NO: 554 - DNA, 625 bp, Homo sapiens
  misc_feature (1)...(625): n = a,t,c or g
attttaaagtgtttctttttagtaaaagattgatcctcaaactgggttttacaaatgtagcaggtaagaggtagtgactgtcaaatgttcaaagttgtgttttgttttggtttggtttggttttgctttcaaagggcacacaaaccaatccgatttgaaaaacacaactttacaataaatgaaggaaacctgttctctatgaatatcccaattgtaacgattaggtctcaccacaggacaagttgctaccacaaattaatcacatgtgaacagcaaactgtctttacgaacataaagaggcattctaagttgtagcagacgcctgctctacgagacattaatggagtaaaatcctggagtattacagataaacagttaaagtgatgaacaagggctttatggtttgtataaacagaaatataaacaattttgtatttttctcaattatatgtaattaaataacgtttcaggctaacaaagtattgggtccctttttttaccagcttatgctaaagagggtttgaactaagggaatttgtttctagccccaatgaaaaagcccccccccccccccctccaaattatggaaagaaaaaaattggnccgagaccttaaaccccccccc

SEQ ID NO: 555 - DNA, 376 bp, Homo sapiens
atttcctaaaactttattcctctaaacatcttttcaattccccagatcttgttttagttgtagaggcccaaagtagagctctctaaacaaaggcttcctcagtgctgtaaaatgaatttgtatctctttgctgttctcttcttttatgtatttctacatataaaaatcatctttatttgttttgctactaaatggcataatttattttcgaaattcagttatttttgtattttgcatgttaaggctctaagccttaacttagggtctgggtaaatatgaactccaagactcctcgaaaatagtgtagaaataatagcaaaattaaagatgtttgtattccctgtgaatttattttttctttcattcaacacagaag

SEQ ID NO: 556 - DNA, 842 bp, Homo sapiens
cccacgcgtccgctgagctgaaaagttggatgtgccaaagtgtaaaaacactgatagtgttccttgctgcagataactgcagcaaaccatgtctttagcttcattatgaagattgcttctttcttgctgcagaataacggtatgtattctctctcactgcagctcccagtgctctgtgtcttaaaatcatttaaagcctatagcttgctttggggagttagtacaggggttaaggaaggctttgccggaagaacaattgtaaatcatgagagttactacttgcgcattgtgtggtagtctctttaatgcataatggtcctttttaataccaaaaattaattaataaaggaaatgattacattgtccaaataactgttaaacatgacagatctgttttatgatactgtgtttgacagttaaacattaagtaaacatttaattgactttaagcttgaaatgttcagaatgctctaacccttgctacagaatcttttctgcagcaagttaagtattttgtgtgttttttcccacctgtagcttatcaggcccggtccaaagccttctagcagaggggattgatcctgtcaggggttgctgccaagacatcggaaggatttttgaccaaggttttcaaaagctcagtgtcacatctgccatttgataaaggaaagattttggatgcagaacctggcatttactggcctttggggcgctgggatgtcggttagccctcggcactccacaaaggagccctgccacacttatttgtactgggggggggggctaatcattccccgaccatgcaatcgaataaatagtccctacaggggctctccagcccc

SEQ ID NO: 557 - DNA, 677 bp, Homo sapiens
ctcatattggtgtaaaaattttatatcactgtaggctaaacttacctctgcacactcctccatgtccactgagcatctgctgaagtctgctttttcttcattttttatggaatggaaagctcatccatgtgtacattattcatgcatttacttttctgccacctccaaagcattcaattaaagcaggaattaaggctcaactatcttactttaacacagttttggcagagatgttacagtgagatgatttttttctgtctgtcaaaggtgtttcttcatgttttccaagatggtctagaacatcatttagagtaaattttcattttggaggaaatttttatgaaaagtctctgtaggtatctcctgtgaatagaggttttaaaaagaaaaagaaggggaaaaaagcccaaagggaaaaaataagtttcttactctgactttcacacatactgtgttctatttgctcccttcatatgtcccagagctaactcctcttcactgagaacgagggcttaatttgaatggttttaatgccttttaaccttttaaaatttttatggacaatttaactggcatttttactcccacccaccagtataaaacttcatgttggtaagaaacccaacaaaaatctttggaaccctgcaaaaatgttttacgttacaatttgacccctc

SEQ ID NO: 558 - DNA, 1828 bp, Homo sapiens
gaaaaaaaatctgaaaccctctcagttctacttcaggaaccgcccggaatccgggtcgacccacgcgtccggtacccactgccggcctccgcgctttctggccgcagtgttcgagtcacatggaagctcctgaggagcccgcgccagtgcgcggaggcccggaggccacccttgaggtccgtgggtcgcgctgcttgcggctgtccgccttccgagaagagctgcgggcgctcttggtcctggctggccccgcgttcttggttcagctgatggtgttcctgatcagcttcataagctccgtgttctgtggccacctgggcaagctggagctggatgcagtcacgctggcaatcgcggttatcaatgtcactggtgtctcagtgggattcggcttatcttctgcctgtgacaccctcatctcccagacgtacgggagccagaacctgaagcacgtgggcgtgatcctgcagcggagtgcgctcgtcctgctcctctgctgcttcccctgctgggcgctttttctcaacacccagcacatcctgctgctcttcaggcaggacccagatgtgtccaggcttacccagacctatgtcacgatcttcattccagctcttcctgcaacctttctttatatgttacaagttaaatatttgctcaaccagggaattgtactgccccagatcgtaactggagttgcagccaaccttgtcaatgccctcgccaactatctgtttctccatcaactgcatcttggggtgataggctctgcactggcaaacttgatttcccagtacaccctggctctactcctctttctctacatcctcgggaaaaaactgcatcaagctacatggggaggctggtccctcgagtgcctgcaggactgggcctccttcctccgcctggccatccccagcatgctcatgctgtgcatggagtggtgggcctatgaggtcgggagcttcctcagtggcatcctcggcatggtggagctgggcgctcagtccatcgtgtatgaactggccatcattgtgtacatggtccctgcaggcttcagtgtggctgccagtgtccgggtaggaaacgctctgggtgctggagacatggagcaggcacggaagtcctctaccgtttccctgctgattacagtgctctttgctgtagccttcagtgtcctgctgttaagctgtaaggatcacgtggggtacatttttactaccgaccgagacatcattaatctggtggctcaggtggttccaatttatgctgtttcccacctctttgaagctcttgcttgcacgagtggtggtgttctgagggggagtggaaatcagaaggttggagccattgtgaataccattgggtactatgtggctggcctccccatcgggatcgcgctgatgtttgcaaccacacttggagtgatgggtctgtggtcagggatcatcatctgtacagtctttcaagctgtgtgttttctaggctttattattcagctaaattggaaaaaagcctgtcagcagggtgccctgaaaaccttgaaggaattttaacgaacgatgttggaaagacaggcgagcctcagtcagatcagcagatgcgccaagaagaacctttgccggaacatccacaggacggcgctaaattgtccaggaaacagctggtgctgcggcgagggcttctgctcctgggggtcttcttaatcttgctggtggggattttagtgagattctatgtcagaattcagtgacgtggtaggaaagaaagtcaggtcaagtgatgcttttgagcttacacacaattcgcaggccgaattacgccactcttt

SEQ ID NO: 559 - DNA, 392 bp, Homo sapiens
cgacccacgcgtccgcacacatgaggttcgtgacacacacacgaggcagtcggggagcagaatcaccaaatgccaaggtcacacaccaggttcccacgactgtctactactcagttatttttaacagctgttaaatatctcagactcaccccagcctgaagctaggtttctgacaataacatgcatttaactctaagtttacttctgttctccctacacttccccacgtatattattcgagttaatttttgtcttgtttccaatttatttcaaaggatgcgaagtacaaaactgcttcggctcattgacttagatttttcatttactttctctctcttggatctaccaccagtaaatgaatatgacatgtatatcagaaactttggaaaaaa

SEQ ID NO: 560 - DNA, 3505 bp, Homo sapiens
gcatcgtccgcagacgccgccaccgccatgggctcctgaggctagcttgtcactttctgcaaaggtttccctcagggagcctcctgctgccaggcaccatgacagtgaggggggatgtgctggccccggatccagcgtcgcccacgaccgcagcagcctcgcccagcgtctccgtgatccccgagggcagccccactgccatggagcagcctgtgttcctgatgacaactgccgctcaggccatctctggcttcttcgtgtggacggccctgctcatcacatgccaccagatctacatgcacctgcgctgctacagctgccccaacgagcagcgctacatcgtgcgcatcctcttcatcgtgcccatctacgcctttgactcctggctcagcctcctcttcttcaccaacgaccagtactacgtgtacttcggcaccgtccgcgactgctatgaggccttggtcatctataatttcctgagcctgtgctatgagtacctaggaggagaaagttccatcatgtcggagatcagaggaaaacccattgagtccagctgtatgtatggcacctgctgcctctggggaaagacttattccatcggatttctgaggttctgcaaacaggccaccctgcagttctgtgtggtgaagccactcatggcggtcagcactgtggtcctccaggccttcggcaagtaccgggatggggactttgacgtcaccagtggctacctctacgtgaccatcatctacaacatctccgtcagcctggccctctacgccctcttcctcttctacttcgccacccgggagctgctcagcccctacagccccgtcctcaagttcttcatggtcaagtccgtcatctttctttccttctggcaaggcatgctcctggccatcctggagaagtgtggggccatccccaaaatccactcggcccgcgtgtcggtgggcgagggcaccgtggctgccggctaccaggacttcatcatctgtggggagatgttctttgcagccctggccctgcggcacgccttcacctacaaggtctatgctgacaagaggctggacgcacaaggccgctgtgcccccatgaagagcatctccagcagcctcaaggagaccatgaacccgcacgacatcgtgcaggacgccatccacaacttctcacctgcctaccagcagtacacgcagcagtccaccctggagcctgggcccacctggcgtggtggcgcccacggcctctcccgctcccacagcctcagtggcgcccgcgacaacgagaagactctcctgctcagctctgatgatgaattctaggtgcgggctgcagtggcggaagtgctggcgccatagccacggtcaggctgtgccccacctccagcctcaccaccaggccaggaggcagctggcacagtgctcacgccgcctttatttattggaccagaaacactcacatgtcacttccagaggaacgggggacagccaggctcgcccatgggccttcaggaatatttatacatggcccagcctgcactgcccgggcgagggcagaggacactgggagcaaggcttatgcccctgctgcccgtcctgtgctgggggcatgctgggaccagccgcacccaggccccaatgcttgtgtgtggaccagcggctgcagccttctagcccctcctccccgcgagactctcaggctgaggtcggcaagccgtggctcccccacacaccgtgcaataccctgtctgacctgggctcttcccgcctgcatccctcccctgtccacctttgtccagtgctagattcacctcaccccgggcaggagtggggatgtgggcgctctgtggtcctcccctcctgacccaggcctctgtggcatgctgcaaggatcagagccagacaccaggagtcacaggccccacccaggaagggcattcagggcccctgggcaccgcttctgttgaagcaggggcttctgggcccctgggtatccccacctgtcgtggccacacctctgcctgcctcatgccccttccccctggcctaccaaggacagcccacagcccgcactgccggctcacttgggtccttcctcgatagctttgggcagagcccttgcttcctggctgcttcagggctcaggggctcccagccctccttcccaggctgatgctgggtcctctctctctttggggcttctccctcccgtttcaggggaaaggtctgagtctccacgtttcagaccagcttctgggggaaggcagtccggcagggagaccgggaggggtggccacacagtggggagctgggaggtggggggaatggtcccagactcctctcggggcccctatccacacagggcctggtgttctaccccatctggcccctggcccatctcttctgtgccttagtcacatatgaaagcgcccctccctggctccccatctgtcccacacgctccctggggctcttagttcagctgctggcactcgcaggatcctgcagtgctgggcccagagcccttggacaggcctcaggagtggtcaggaccaccaagcccctcctctccccctccacacctctagacctggggcctccggaacccccagcaggctgggcttatactagctcctgacttaggaagagcctcgtgtcacaacacgtgtccctacaggcaaagtgtcctggcatttaaaacccagattatccctgggtttgggctgcagtcacctggagaagctggtagggtaagggagagggaccctgccggtgttcactggggattctttcttttggtccttcctggaatgaacaggttccctccctgccacctgtgaggagagttggggcccagccgtcttcctggcctccttcctttcctcgtggcagaggcctgcatgtgggtgccagaggccagctctccccctccatcttgggggggcggagcagttgggcccaagctgcccgggagggtgggtgcagacacaggctgaggaccagccctggccctgccccgccatctgctttcaccaagctgtctctccaccgtggcttcccttctccctccaggccaaagtgctgctgattcccactcccttggttttcgcctgcccagcgttgctgtttgcgtggagggtggggggagctcagtggcagggaatcagcggtccgtggggtcgtggggacgggaacatgtgcccgaccgctccatcccctcctcctccttaggatgcataacctaccttgtctttttttttttaaattttctttccaggttagagtagctctttgtacataaagaatacttgaaaaattaattgtatgatgtatgagcgaagacagaggtctcctagttttgtatcttgttgtatgactgccatgagttccaccagaaagccactctattttggtctctgtgacattttaaatgcgtgacagaagtgagcaaataaacgtgaggaagaaatctatatatgagataatatagattgtattgaaatctc

SEQ ID NO: 561 - DNA, 396 bp, Homo sapiens
acacattccacccttgagattgctgtaacagtgatctcaacctctgataaggtaagtttataaacttaatgaggaaaaaatggggaaaaaggtcactcttctgctgcagaagtgcgcttggcttctcttggtttgctgcctattcactggcattaagtacctgaacaaatgttttatcacagacagggaactgttgagggatgttcacaatgcattgaacatccttaggcataatttttatgtgaactgggcatccttaaatacattctgactccatgatcagattaccagaaagtgcaggtcccactcactatcttgattcagcatctcccatctggccaaagttgaattttacattgagttggatggtgataaatatgcttagcaaaagtatat

SEQ ID NO: 562 - DNA, 612 bp, Homo sapiens
caactatcttatttccttatcatgcacaagttaaatgttagactgaggagtaggtgagttatccccaaggaagtaaaatgatgttaattttcttgaggtcacatgaattgtgagtagctgaatgctactgtgaattctgggcagcccgaccacagagcctgaactcttaaatattatactgtattaacttgacatgtttataaaagtaacaattacatgctacctgaatgccctcagtagttttgaacatggtgcaactgtttatccctatactaaaattccaattaggctattctgttttgagtctttgtaatcatgttttagaatttttgtttccttcctcattgtcaggcatcttttcttcctcccttcccctccttcttcccttccctctttctcttccctctcttcccccttctctttttccttctcttagagtcttgctctgccacccacactggagtgtagcctcaaactcctgggctgtagccatcctcctacctcagcctcctgagtagctgggactgcaagtgtataccactatgcctggctaatttaaaaaaatttaaaatttttttttttttggagaaacaaaagccttactatgttggc

SEQ ID NO: 563 - DNA, 791 bp, Homo sapiens
acatccaacatttgaatgtattttgactaggtaatttttttctcctttgttaataaaaatagatttaattttttaaatgtcatttttcttgcatctcatcaaatatactttcatacactataaaaatgatgttgggtcatatgtatcacatgtctgtaattcagaaatgcaaacctttggacactgactcaacatctggagatattttttctggttcttatggctggtgttctcctacagctctctacgagcagtcttgtgaagcccacaagcaccgagggaacccatccgggctttactatattgatgcagatggaagtggccccctgggaccatttcttgtgtactgcaatatgacaggtatgttgataatcgttagatgcatagatcagaatagaccaaggagaaatttacctagttggcagcattattaaaacatgcagtttgatagtgtgtacttgctaagtagaagcattaaatatgtatttattaattttgttgtcaacaaaattttcttgtatttcttctttgcctgggttggattataggcaagattcaatgctctgccaaggcatctctctagctcctacactcctcataatacatctgttcatgtgcatcatgataaaatacaaacctctgattcggtgatttacatgctttctgtatttagaaaaaacagaggtgtttaaaaatgctaagaaataacatagatatgttaatgttctatgtgcatcttaaataatttagtgatttttatgtcatataattttttcataaccaaagaaact

SEQ ID NO: 564 - DNA, 414 bp, Homo sapiens
caggggtaagccaccgcacccagccccgtaaatatttcttgaggatctactgcgtgccaggccttgtgctgggttccaggagctgattcagagagtgcagagatgaaaaaaggagtggggtgtacgtgtgtatccgtgtgtccatgcatgtgtgtgcatccgtatgtgtgcacatgtgcatgcatgcatgtgtgtgtgtgtctgtgtgcttggtgcctctctcagcctggtggcctgggaggcttctcagaagaggtcacatctctgccaagaccaagggcactgtaaggcagccagatgagagggaggggaagagagatgggagggaggctgggctgagggtacacagtgtggctgctgcctggtgccctgtgagggagcagggtcccttctagctgggagcaatggcgcatg

SEQ ID NO: 565 - DNA, 858 bp, Homo sapiens
cggacgcgtgggctttaaaaatacaaaaataatagccttgtcttcttaacctgcaaaagtaattttcctgcataatttaatgttttcatgtggaacaaatgagaatgctttagaaagcacattgtacactgtaaacttctatacaacgtggtgatgttatttttaaagaaaatacaattcttaaagtgtaacaaggtgtttagatccctggatttttgcgtagccctacctttattgttctcatcttctgctgttttacagataactcctgtagatacattttctgatccccacttagttctaaccttagttaagctgcttatgaacattttaaatattgcagttattagtctgactttccctggagaatatgaagtttctttagcctttgaaaatattctcatgtatactcatgcattcataatctgtttctgtaacagacagtggctttttaaaagtaatagtgaaagtaatcttagtagcaatgttaatttatttgactcttgctagttttcaggtacgcaaaaggaggagatgatttcctttaaaaactcagctttgaatagttcgtgttatctggtatatctgaaatattcagaaatgttaaaacagtttttgtttgcctttgctgttaagtttgaaacctcttagtgctttcaattgataatcctggaaaccaacctcagtattgtaggaatacatagattatcggagttttatagtcttgaaataaagggctaataatcatgatgatattgctgaaacttaaaatgcaaattgggttaaggaacattcagggattttcaataacttggaaacggaaggaactggggtggacagtttggagggtagattccc

SEQ ID NO: 566 - DNA, 906 bp, Homo sapiens
  misc_feature (1)...(906): n = a,t,c or g
agcggcccagttttcgggtcgacccacacgtccgcctcactctgaccctgatatcttttctgctgttaatctgttctctgagaaaacatctcaagaagatgcagctccatggcaaaggatctcaagatcccagcaccaagggccacataaaagctttgcaaactgtgacctcctttcttctgttatgtgccatttactttctgtccatgatcatatcagtttgtaattttgggaggctggaaaagcaacctgtcttcatgttctgccaagctattatattcagctatccttcaacccacccattcatcctgattttgggaaacaagaagctaaagcagatttttctttcagttttgcggcatgtgaggtactgggtgaaagacagaagccttcgtctccatagattcacaagaggggcattgtgtgtcttctagcagaaaacaaactggtggtgtatgaaacattttatatttcttactgggttttctgtaatatatgtatatgaataatttccacatgtatacctagaaaagtcttttacctaaagttagtctacaaaagtacatatatatagatggctgtggtgtgaccgtgtgtgcacatatgtgaatgtgtatatatcacgcaacaggagtgtcattcatgctgctggcccctggtgaagtgacaagtacaattaaaggtggctctgatccttttaaacacctaccaaaccctaaatttgattccaaaaggaccattctgcaaagagtttgcaaagatctgggcccacttgtgagcaccaacctttaaacatgatgcgccagtctcccaggaggccctactcattcccctacataactatttgatggccccacccctaccanccccgcttccccccacctgaaaaaagcaggccacagaagc

SEQ ID NO: 567 - DNA, 1227 bp, Homo sapiens
tttctgtttttttttttaatctgccattagtaattaattctttgaagatactttggagattcattttcttgagtggcactgccatgctcattcagtgaaaacttgtggggtatagaaatggaatggagagtttcaaacagctttgctgaaactgtactttgggctccagacttcactgtccttaggcattgaaaccatcacctggtttgcattcttcatgactgaggttaacttaaaacaaaaatggtaggaaagctttcctatgcttcgggtaagagacaaatttgcttttgtagaattggtggctgagaaaggcagacagggcctgattaaagaagacatttgtcaccactagccaccaagttaagttgtggaacccaaaggtgacggccatggaaacgtagatcatcagctctgctaagtagttaggggaagaaacatattcaaaccagtctccaaatgggatcctgtggttacagtgaatgaccactcctgctttatttttcctgagattgccgagaataacatggcacttatactgatgggcagatgaccagatgaacatcatcatcccaagaatatggaaccaccgtgcttgcatcaatagatttttccctgttatgtaggcattcctgccatccattggcacttggctcagcacagttaggccaacaaggacataatagacaagtccaaaacagtactgcacgacgtgaatcatgacattggagaagacactgacgtagaggcactcgaagagtcttcgtaagctgtgcagccacagaaatactagcactaagaatgcagacagtgccagctcccctccctggaactgtgccgccccgagaattctgagcaaaccatgaagccagcttggaaaaggtgctcccaggaacagagattgagtaaggcaccaaagcaggaagccattccacagcactgagatgatataaaagtgggaaaaatatctcttggggacatcaaaggctcggcaggcggcggggcgcgacggctccccacacttggttttcccatagcggatcaggtcctggaagatcgcgcagcccgggagcaggccgggcggcaggagctgcagcagtagggtcagcaggaaggcggcggtcagcgtgagccacaccgcgcgcagcgggttcagcgccgagtgctcggcctccgcccagggagccatggcccgcgtgcccgccttccgcgctgctggcgccccca

SEQ ID NO: 568 - DNA, 1450 bp, Homo sapiens
gcccacgcgtccgcccacgcgtccgtttcccagccttgggattttcaggtgttttcatttggtgatcaggactgaacagagagaactcaccatggagtttgggctgagctggctttttcttgtggctattttaaaaggtgtccagtgtgaggtgcagctggtggagtctgggggaggcttggtacagcctggggggtccctgagactctcctgtgcagcctctggattcacctttagcagctatgccatgagctgggtccgccaggctccagggaaggggctggagtgggtctcaggtcttagtggtagtggtggtagtagcacatactacgcagactccgtgaagggccggttcaccatctccagagacaattccaagggcacactgtatctgcaaatgaacagcctgagagccgacgacacggccagatattactgtgcgaaaggtggggttgagctggcatcaacaaaaccatcctctatctggcgactcaacccaatcagatactggtacttcgatctctggggccagggaaccctggtcaccgtctcgagtggcgatgggtccagtggcggtagcgggggcgcgtcgactggcgaaattgtgttgacgcagtctccaggcaccctgtctttgtctccaggggaaagagccaccctctcctgcagggccagtcagagtgttagcagcagctacttagcctggtaccagcagaaacctggccaggctcccaggctcctcatctatggtgcatccagcagggccactggcatcccagacaggttcagtggcagtgggtctgggacagacttcactctcaccatcagcagactggagcctgaagattttgcagtgtattactgtcagcagtatggtagctcaccgacgacgttcggccaagggaccaaagtggatatcaaacgaactgtggctgcaccatctgtcttcatcttcccgccatctgatgagcagttgaaatctggaactgcctctgttgtgtgcctgctgaataacttctatcccagagaggccaaagtacagtggaaggtggataacgccctccaatcgggtaactcccaggagagtgtcacagagcaggacagcaaggacagcacctacagcctcagcagcaccctgacgctgagcaaagcagactacgagaaacacaaagtctacgcctgcgaagtcacccatcagggcctgagctcgcccgtcacaaagagcttcaacaggggagagtgttagagggagaagtgcccccacctgctcctcagttccagcctgaccccctcccatcctttggcctctgaccctttttccacaggggacctacccctattgcggtcctccagctcatctttcacctcacccccctcctcctccttggctttaattatgctaatgttggaggagaatgaataaataaagtgaatctttgcaaaaaaaaaa

SEQ ID NO: 569 - DNA, 1450 bp, Homo sapiens; identical to SEQ ID NO: 568

SEQ ID NO: 570 - DNA, 1450 bp, Homo sapiens; identical to SEQ ID NO: 568

SEQ ID NO: 571 - DNA, 1450 bp, Homo sapiens; identical to SEQ ID NO: 568

SEQ ID NO: 572 - DNA, 408 bp, Homo sapiens
ctatatccctaaactcaaagggacatccagtgctatcaagacacccaattgaacatacacatatgttccccccttacttttctcttattttacttctattcacttttgcttcgaaattctttctgtctctgaacctgaaaaaaagcaacatagttaaagcaagaattgagagtacaaagacagtgatatcaaagagatgttaatcctccacacagtctggctgcattgaggatatttctctttgtgcagtagaaaactggaaatagctaagtctattggaactcttctttctcaaattctattgaactgaagagtaggaaatttagaaacagtaagacgtgggagataatttaactgaattcactacttttgtgacaaggatatccagaggaactcagggacttgccc

SEQ ID NO: 573 - DNA, 640 bp, Homo sapiens
cacttcttcatcattccatcagaaccttataatgaatttgatgcagattgcttttgaggggtttatctctcagtcctaaacatataggggcatgttagaaaatttgggattctaggtgtgatgcctgaaaagggactgatataactgagcatggctatgcagtctgtgataagaaaacaattcacagctctagctggcttctgcttctggttctgtctctttaccttagcagtcctgagtctcaccttgcttatctgcaaactgaggataatgccatttaaacttgaaggtttgtttcaagaattaaataaatcatggcatatgaagctcttgtcacaagatagggagttaataaatatgctgttgctcttaatgggcaggtcctaagtgatggcttagaaacctaagattggaaggcatcttggagatgttctggctcaacctcctaacaatgcaaaagtttgtcctagaacactcctggaagatggatctttatgctctcattagataacccagggatcccactgtctcagaaggcagtctgtgcatattttttggcaggtctaattcttaatgataataacacacattttatttgtggttacgaaatgcttttacgtcattatattaactgaactgt

SEQ ID NO: 574 - DNA, 3967 bp, Homo sapiens
cgccccccgccgccgctgcacaccggacccagccgccgtgccgcgggccatggacctgcccaggggcctggtggtggcctgggcgctcagcctgtggccagggttcacggacaccttcaacatggacaccaggaagccccgggtcatccctggctccaggaccgccttctttggctacacagtgcagcagcacgacatcagtggcaataagtggctggtcgtgggcgccccactggaaaccaatggctaccagaagacgggagacgtgtacaagtgtccagtgatccacgggaactgcaccaaactcaacctgggaagggtcaccctgtccaacgtgtccgagcggaaagacaacatgcgcctcggccttagtctcgccaccaaccccaaggacaacagcttcctggcctgcagccccctctggtctcatgagtgtgggagctcctactacaccacagggatgtgttcaagagtcaactccaacttcaggttctccaagaccgtggccccagctctccaaaggtgccagacctacatggacatcgtcattgtcctggatggctccaacagcatctacccctgggtggaggttcagcacttcctcatcaacatcctgaaaaagttttacattggcccagggcagatccaggttggagttgtgcagtatggcgaagatgtggtgcatgagtttcacctcaacgactacaggtctgtaaaagatgtggtggaagctgccagccacattgagcagagaggaggaacagagacccggacggcatttggcattgaatttgcacgctcagaggctttccagaagggtggaaggaaaggagccaagaaggtgatgattgtcatcacagatggggagtcccacgacagcccagacctggagaaggtgatccagcaaagcgaaagagacaacgtaacaagatatgcggtggccgtcctgggctactacaaccgcagggggatcaatccagaaacttttctaaatgaaatcaaatacatcgccagtgaccctgatgacaagcacttcttcaatgtcactgatgaggctgccttgaaggacattgtcgatgccctgggggacagaatcttcagcctggaaggcaccaacaagaacgagacctcctttgggctggagatgtcacagacgggcttttcctcgcacgtggtggaggatggggttctgctgggagccgtcggtgcctatgactggaatggagctgtgctaaaggagacgagtgccgggaaggtcattcctctccgcgagtcctacctgaaagagttccccgaggagctcaagaaccatggtgcatacctggggtacacagtcacatcggtcgtgtcctccaggcaggggcgagtgtacgtggccggagccccccggttcaaccacacgggcaaggtcatcctgttcaccatgcacaacaaccggagcctcaccatccaccaggctatgcggggccagcagataggctcttactttgggagtgaaatcacctcggtggacatcgacggcgacggcgtgactgatgtcctgctggtgggcgcacccatgtacttcaacgagggccgtgagcgaggcaaggtgtacgtctatgagctgagacagaaccggtttgtttataacggaacgctaaaggattcacacagttaccagaatgcccgatttgggtcctccattgcctcagttcgagacctcaaccaggattcctacaatgacgtggtggtgggagcccccctggaggacaaccacgcaggagccatctacatcttccacggcttccgaggcagcatcctgaagacacctaagcagagaatcacagcctcagagctggctaccggcctccagtattttggctgcagcatccacgggcaattggacctcaatgaggatgggctcatcgacctggcagtgggagcccttggcaacgctgtgattctgtggtcccgcccagtggttcagatcaatgccagcctccactttgagccatccaagatcaacatcttccacagagactgcaagcgcagtggcagggatgccacctgcctggccgccttcctctgcttcacgcccatcttcctggcaccccatttccaaacaacaactgttggcatcagatacaacgccaccatggatgagaggcggtatacaccgagggcccacctggacgagggcggggaccgattcaccaacagagccgtactgctctcctccggccaggagctctgtgagcggatcaacttccatgtcctggacactgctgactacgtgaagccagtgaccttctcagtcgagtattccctggaggaccctgaccatggccccatgctggacgacggctggcccaccactctcagagtctcggtgcccttctggaacggctgcaatgaggatgagcactgtgtccctgaccttgtgttggatgcccggagtgacctgcccacggccatggagtactgccagagggtgctgaggaagcctgcgcaggactgctccgcatacacgctgtccttcgacaccacagtcttcatcatagagagcacacgccagcgagtggcggtggaggccacactggagaacaggggcgagaacgcctacagcacggtcctaaatatctcgcagtcagcaaacctgcagtttgccagcttgatccagaaggaggactcagacggtagcattgagtgtgtgaacgaggagaggaggctccagaagcaagtctgcaacgtcagctatcccttcttccgggccaaggccaaggtggctttccgtcttgattttgagttcagcaaatccatcttcctacaccacctggagatcgagctcgctgcaggcagtgacagtaatgagcgggacagcaccaaggaagacaacgtggcccccttacgcttccacctcaaatacgaggttgacgtcctcttcaccaggagcagcagcctgagccactatgaggtcaagcccaacagctcgctggagagatacgatggtatcgggcctcccttcagctgcatcttcaggatccagaacttgggcttgttccccatccacgggatgatgatgaagatcaccattcccatcgccaccaggagcggcaaccgcctactgaagctgagggacttcctcacggacgaggcgaacacgtcctgtaacatctggggcaatagcactgagtaccggcccaccccagtggaggaagacttgcgtcgtgctccacagctgaatcacagcaactctgatgtcgtctccatcaactgcaatatacggctggtccccaaccaggaaatcaatttccatctactggggaacctgtggttgaggtccctaaaagcactcaagtacaaatccatgaaaatcatggtcaacgcagccttgcagaggcagttccacagccccttcatcttccgtgaggaggatcccagccgccagatcgtgtttgagatctccaagcaagaggactggcaggtccccatctggatcattgtaggcagcaccctggggggcctcctactgctggccctgctggtcctggcactgtggaagctcggcttctttagaagtgccaggcgcaggagggagcctggtctggaccccacccccaaagtgctggagtgaggctccagaggagactttgagttgatgggggccaggacaccagtccaggtagtgttgagacccaggcctgtggccccaccgagctggagcggagaggaagccagctggctttgcacttgacctcatctcccgagcaatggcgcctgctccctccagaatggaactcaagctggttttaagtggaactgccctactgggagactgggacacctttaacacagacccctagggatttaaagggacacccctacacacacccaggcccacgccaaggcctccctcaggctctgtggagggcatttgctgccccagctactaaggtgctaggaattcgtaatcatccccattctc

SEQ ID NO: 575 - DNA, 934 bp, Homo sapiens
ctaatttctaattcttctgtagcatttattaagaaaagttaaaataactgcttaatttgagatgaaattaacacatgagaacttcactcattaggtggtatgttctgtgactgttgtttaatgtgtattttatggcagttttgactgccattttgtcatttgagaaaggtgaaatgaagtactattttgggctgcgaaacctgaagttgtagggaaacctgtgtttgaagaccattaagaagttgttttgcatactaagaatggcactgaacatcattatcaatcctgtgtggttttgccactgcttgacttgcacaattcacattgattttcatattttattcattaaaatttttaaacacatgttttttaggtcgctttggtcatcttggcttagccatcaacttgatcacatatgatgatcgcttcaacctgaaaagtattgaggagcagctgggaacagaaattaaacctattccgagcaacattgataagagcctgtatgtggcagaataccacagcgagcctgtagacgatgagaaaccttaacaagcatgtacgtccctgacagaacagctaacaggaacctttaaatgagggaaatcaaaatcttctttcctgggggaaaattggtgccacacccttttctattacccctaaagggtaccacacccccttagcctcaactgaccgctcatacccaccctcctcctcgcggggtctgtcaccctacatatccgcacacccccccaaccgaccttcctttgctggcctcacttcccccgcctatactgtgtccctttcttactacttccactctagtcccggcgtgaccatcaaaacgatcgcaccttcactcacagttcacgccctacccgcacacctcgtgtgactacctctcagagccgcgtgcgcgcctgacactctcgtgccg

SEQ ID NO: 576 - DNA, 634 bp, Homo sapiens
agaccagcggccacccacgcgtccggtctgaatcttattcctttgtagatggccatttttcctctttggaagggggtgaatgttttggtatgcatattttcctcattcatcatgctgaatatttactgtacccttttgatctggaaatttatttattcagcttttttctgttatattacttctttgatgattttcccctttagttttttctgttctttctttctagaccttcttaaagtcatagtttatatcttcttcctttatctgtactcctcaagataaatgctagaagttggttaagccaggacttaaacccagcttgtagctttataagctgggttttgaacctcagttttctagttagtaaagtgatcatgagaataacgacctcaaaggatatcatgaggattaaattagatttttttaaagtccttagcactatgcccagtacatacagcattcaataatgttaggaattgttgctgtcatgttcactattaatttatttaacaaatatttattgaatgctaatacaaatgtgccatgctcttctaggtgacccccagtaaggtagaggactaagaagacatgagatttatgtgaaaaagcatttttaaagaagaccattggcaat

SEQ ID NO: 577 - DNA, 810 bp, Homo sapiens
gtacactgcggtggaattcccgctttttgaggcctcagttttcctcatctgcaaaaccagcctaatgatgctatagagttgttatagaaagttgaatctttgtcatctattgaatgcttgaaatttagctaaaagtgtctcaggagatgggctaccttctgtggttagtactgtctatcttggtgtgtacagaattgggacttggcaggttgaccttccctctggattcagaaagccccaggacttcttataaagttaggccatgggtcgtcttggaggcttgggtctggtaaataattgagcctgagctcacaatcctgcccctgggtccaggtggctggtctgctgcccccaaaagcctgaccttcttggtcctgtgggtctgtcagtaaggcaggtagccatagctggagagagacagccaccaggctgggatcttggacagtccctacatttctgtgtaatcctggactaggcagggcatggagtagatggaaaatggcggccatcttggaaatgtgccataacaactcacttttcaagaccgtcccctagaggagaaaagtcccgccctgggtagtcaattaacgaattttcaagaccccgcgcttgcgctcctagccggagattccacgagagattttaatctgacgccagagtggatcacagagcggacggggatacactgaaaaagaccggtcaggagtgacgtcgcgaccccctcttggtagaaaaggacgactgctgcccctggagatcgtggaggccaataaccacgcggacgccatgttgacccgcaagagcgggccc

SEQ ID NO: 578 - DNA, 810 bp, Homo sapiens
ttttttttttttatgtattcattgctttatttgtccttttcacgggtcactacattttagggcatttgatctataattggtagaacaggtttcaggcagggaggataggagcatcatcttccatccccatccacctccgctctttatcttgatgtcacaccaagtgtgatagcgcctccagcagtttcttcacagcttcagaagcctctggtcccagctcatttacacacttccttagcccctccacaaggtgctcaacagaaatgcccagagttttcagaagaagctttaatggatccataaagggaagaatgttgtccagaggtaaaggtgccaacttgtcaacaggaaggggcactttgttgatgaggaaggcagtagctgcaggaaaaagagaaaccaggtgagacaggcacatctgggcccagactatgacctcatcttctttccctgtgtccatcaatagctccattccagatccactcatcttacttccattgaaaacttctacctctggccctttgcacctgctgttccatctccctagaactttttttccttagctagctacttacctttctttctcacattatttggtctctcttcaaatattacctcctcggagaagcctgcaatggccatagtcactctccgtcatttattttttcttaccattacctaaaaaaagcaactcttcatttgctgtttttattgtctttattttctcattagaatggaggctccatgagaacaaggaatgtgtgttttttcgctaatgcacccatgcctacaactggaattccaccacag

SEQ ID NO: 579 - DNA, 1825 bp, Homo sapiens
ctcaggaagcagcatcggaggtgcctcagccatggcatggatccctctcttcctcggcgtccttgcttactgcacaggggccgtggcctcctatgagctgactcagccaccctcagtgtccgtgtccccaggacagacagccagcatcacctgctctggagatagattgggggataaaattgcttgctggtatcagctgaagccaggccagtcccctttagtggtcatccatcaagataccaagcggccctcagggatccctgagcgattctctggctccaactctgggaacacagccactctgaccatcagcgggacccaggctatggatgaggctgactattactgtcaggcgtgggacagcagctcttatgtggcgttcggcggagggaccaagctgaccgtcctaggtcagcccaaggctgccccctcggtcactctgttcccgccctcctctgaggagcttcaagccaacaaggccacactggtgtgtctcataagtgacttctacccgggagtcgtgacagtggcctggaaggcagatagcagccccgtcaaggcgggagtggagaccaccacaccctccaaacaaagcaacaacaagtacgcggtcagcagctatctgagcctgacgcctgagcagtggaagtcccacagaagctacagctgccaggtcacgcatgaagggagcaccgtggagaagacagtggcccctacagaatatttattgagggtttattgagtgcagggagaagggcttgatgccttggggtgggaggagagacccctcccctgggatcctgcagctctagtctcccgtggtggggggtgagggatgagaacctatgaacattctgtaggggccactgtcttctccacggtgctcccttcatgcgtgacctggcagctgtagcttttgtgggacttccactgctcaggcgtcaggctcaggtagctgctggccgcgtacttgttgttgctttgtttggagggtgtggtggtctccactcccgccttgacggggctgctatctgccttccaggccactgtcacggctcccgggtagaagtcacttatgagacacaccagtgtggccttgttggcttgaagctcctcagaggagggtgggaacagagtgaccgagggggcagccttgggctgaccagagtcactggcttgttgcatagggtcagggatgccatggcagggacctggcatctgaccaagagcggacctatcccctgtcccggaccagcaactctttagcccagagactggagcagacacagaaggcatgcgagaagtgccgtgtgatgcgtggttaggtttctggcagctgtagcttctgtgggacttccactgctcaggcgtcaggctcaggtagctgctggccgcgtacttgttgttgctttgtttggagggtgtggtggtctccactcccgccttgacggggctgctatctgccttccaggccactgtcacggatcccgggtagaagtcacttatgagacacaccagtgtggccttgttggcttgaagctcctcagaggagggcgggaacagagtgaccgagggggcagccttgggctgacttaggacggtcagcttggtccctccgccgaataccacgagagcactgctgtcccacgcctgacagtaatagtcagcctcatccaaaggctgcgtcccgctgatggtcagagtggccgtgttgccagacttggaggcggagaatcggtcagggatccctgagggccgcttccaatcttgatagatgaccatcacaggggactggcctgtcctctgctgataccagccagtagat

SEQ ID NO: 580 - DNA, 5801 bp, Homo sapiens
cgaccatgagagataaggactgagggccaggaaggggaagcgagcccgccgagaggtggcggggactgctcacgccaagggccacagcggccgcgctccggcctcgctccgccgctccacgcctcgcgggatccgcgggggcagcccggccgggcggggatgccggggctggggcggagggcgcagtggctgtgctggtggtgggggctgctgtgcagctgctgcgggcccccgccgctgcggccgcccttgcccgctgccgcggccgccgccgccggggggcagctgctgggggacggcgggagccccggccgcacggagcagccgccgccgtcgccgcagtcctcctcgggcttcctgtaccggcggctcaagacgcaggagaagcgggagatgcagaaggagatcttgtcggtgctggggctcccgcaccggccccggcccctgcacggcctccaacagccgcagcccccggcgctccggcagcaggaggagcagcagcagcagcagcagctgcctcgcggagagccccctcccgggcgactgaagtccgcgcccctcttcatgctggatctgtacaacgccctgtccgccgacaacgacgaggacggggcgtcggagggggagaggcagcagtcctggccccacgaagcagccagctcgtcccagcgtcggcagccgcccccgggcgccgcgcacccgctcaaccgcaagagccttctggcccccggatctggcagcggcggcgcgtccccactgaccagcgcgcaggacagcgccttcctcaacgacgcggacatggtcatgagctttgtgaacctggtggagtacgacaaggagttctcccctcgtcagcgacaccacaaagagttcaagttcaacttatcccagattcctgagggtgaggtggtgacggctgcagaattccgcatctacaaggactgtgttatggggagttttaaaaaccaaacttttcttatcagcatttatcaagtcttacaggagcatcagcacagagactctgacctgtttttgttggacacccgtgtagtatgggcctcaaaagaaggctggctggaatttgacatcacggccactagcaatctgtgggttgtgactccacagcataacatggggcttcagctgagcgtggtgacaagggatggagtccacgtccacccccgagccgcaggcctggtgggcagagacggcccttacgacaagcagcccttcatggtggctttcttcaaagtgagtgaggtccacgtgcgcaccaccaggtcagcctccagccggcgccgacaacagagtcgtaatcgctctacccagtcccaggacgtggcgcgggtctccagtgcttcagattacaacagcagtgaattgaaaacagcctgcaggaagcatgagctgtatgtgagtttccaagacctgggatggcaggactggatcattgcacccaagggctatgctgccaattactgtgatggagaatgctccttcccactcaacgcacacatgaatgcaaccaaccacgcgattgtgcagaccttggttcaccttatgaaccccgagtatgtccccaaaccgtgctgtgcgccaactaagctaaatgccatctcggttctttactttgatgacaactccaatgtcattctgaaaaaatacaggaatatggttgtaagagcttgtggatgccactaactcgaaaccagatgctggggacacacattctgccttggattcctagattacatctgccttaaaaaaacacggaagcacagttggaggtgggacgatgagactttgaaactatctcatgccagtgccttattacccaggaagattttaaaggacctcattaataatttgctcacttggtaaatgacgtgagtagttgttggtctgtagcaagctgagtttggatgtctgtagcataaggtctggtaactgcagaaacataaccgtgaagctcttcctaccctcctcccccaaaaacccaccaaaattagttttagctgtagatcaagctatttggggtgtttgttagtaaatagggaaaataatctcaaaggagttaaatgtattcttggctaaaggatcagctggttcagtactgtctatcaaaggtagattttacagagaacagaaatcggggaagtggggggaacgcctctgttcagttcattcccagaagtccacaggacgcacagcccaggccacagccagggctccacggggcgcccttgtctcagtcattgctgttgtatgttcgtgctggagttttgttggtgtgaaaatacacttatttcagccaaaacataccatttctacacctcaatcctccatttgctgtactctttgctagtaccaaaagtagactgattacactgaggtgaggctacaaggggtgtgtaaccgtgtaacacgtgaaggcaatgctcacctcttctttaccagaacggttctttgaccagcacattaacttctggactgccggctctagtaccttttcagtaaaggggatctctgcctttttactatacagcataccacgccacagggttagaaccaacgaagaaaataaaatgagggtgcccagcttataagaatggtgttagggggatgagcatgctgtttatgaacggaaatcatgatttcccttgtagaaagtgaggctcagattaaattttagaatattttctaaatgtctttttcacaatcatgtactgggaaggcaatttcatactaaactgattaaataatacatttataatctacaactgtttgcacttacagctttttttgtaaatataaactataatttattgtctattttatatctgttttgctgtaacattgaaggaaagaccagactttttaaaaaaaagagtttatttagaaagtatcatagtgtaaacaaacaaattgtaccactttgattttcttggaatacaagactcgtgatgcaaagctgaagttgtgtgtacaagactcttgacagttgtgcttctctaggaggttgggtttttttaaaaaaagaattatctgtgaaccatacgtgattaataaagatttcctttaaggcagaggctggtcgagatgctgctgttatcttctgcctcagacagacagtataagtggtcttgtttctaagattcctaccaccagttactttgggccaagtatccacatccccttgcgtatgggaggtgggtgaagagtgttggatgcaaagtggttattatgggaagtagctcgatggtaaaaggacaaacacctatctatcttagagcttaagcctgtatgtgcttattcccaagggagatagaggtgtttaatcacaaggacagcatgagttagaggacactggcatcaacagctgccacagccgtgcacaccagggccagagcagcccactgacatctgtctttggtcttgagatcaaatgcatcccattcttcatacattagaaggtcgacctccttgaagcagaccaagtatagcaagcctctaaaaggacttactgagaaacagaatcagaaactctagaactctagttagggcccttcagcagggctgcagagcctccctggatacccaggcctgggaaagcctgtctggtcttgtcaccccaggtgacaaatacaactggaatctttcaatgagttaatgagatactgagaatgagcctcgtggaattttccatgcctaccctttctaaggaagacatccaacagttcatgtgggctctggcttcgtgttaacatgaggaactaaagacatgtttcaccccgtgagaaacagaaggatcccctgaacagtaactgatttgacaagtatcgacacataaagttatggcatcagcattctcttactcaggcacggtcagaagtaacgctgctttcatcacggctaacctctcacactgagagaagtattcacagcaacagaagctccagcagcggccgtgaaggtatcttccagaggtgtgggtttttgcatttcaatctgctccatgctacggaccaacacagtattgagtcaactgtgaccttaagatcagaggaacgtcaatactgccacaaggccacctttccagaactcgtgggcaggtaaactatgctttggatgtgctttctttcaccaaaatcactcaactcaggagccacaaatagtccagcaatttcatttccctcaatgctattttagtctcaaaggaaaccatgtaaatttcatcaagagaaggtcaaaggggatatatcgccactgaaaatgtttacacagtgaccatgagttacacatttacttagagaaacttaacttaataaagaatctgtagagtgtgttggcttggaaaacacacacacaaagaagatacctcacgcttagtatgttctgctttctgaacagccaccactgggaacccagtggcctctgtgggactgaactcctaaacgcagggtgcgggagctgggcaggagaggtgacctccaactgtgttcctaaagttcatctttcgcttggctcaggacaaagcggtgtaacgagtcaaggtctctgcctccactgtgctcactgactttcttccctcctcggaaaagcaataacgtggggtagcctcgtaccgaatacttgctgcagatattccgttcagcagtgcagtctacttcggcgatcttgacccccgccagaccagggaattcctttttagagagttcctcccaagtaggagccagagtcttacaatgaccacaccatggagcataaaacttgatgaaggttattccttctgcaatggtgtcatcgaagttattttcagtgagtgccaacacagtgcccttgtcagcctcgggctcagctgccagcaccggggcctctgagggcgtgacggtctccgtcgctccagtctctgtgcgctgcagctgcgactccacgtactccctcagtgactccaaatcccgctttcccttgtactgatccacctttttcccatctcggaaccagagaagagtgggatagccacgaacctggtttccggagcagagttcatagtgctgtgtacaatcaaccttgccaatcttgacagtttcggaatgttcaaggcccagagccagctgctcccaggttggagccagggctttgcagtgaccacaccacggagcgaagaacttgataaagtggtcgccttgtgcaacgtgcagctcaaagttgcttgctgagagctcatacagcccttgcttgagctcgggggcactgggcggttccacttccggctctggtgtcactggctcctcgttcagtgtctgcagcatccagttttccagtgtctggaagtcccgaggaccctggtacttcacagcttcttggcctggcttgaaaagctttaaggtggggtatcctcgcaccccctgggcggagcacacgtcggagtgggccgtgcagtccactttagccacatagactttggcatcttccatgctgttgtatttgtctcccaggtcattccaagtcggctgcagccgctggcagtgtccacaccagggcgcgaagaacatgacgaagtgcgcggcgctctggatcccgtgcgtgaacatgtcggccgtgtacaggtgcttgctgtgcgggtcctgtccgtcctcgccgtctgccgcggggggcccgtccgccgccgccgccgccgcctcctgggcccgggcgccccagcgcccgccgccgccatggcccagcagcagcagcagcagcgcagtcagggccgccggccgggccagcagcgggaggaggcgtcctgggcgcgcgggcat

SEQ ID NO: 581 - DNA, 1105 bp, Homo sapiens
tttcgtatgggctgcaggctgctctgctgtgcggttctctgtctcctgggagcggtccccatggaaacgggagttacgcagacaccaagacacctggtcatgggaatgacaaataagaagtctttgaaatgtgaacaacatctggggcataacgctatgtattggtacaagcaaagtgctaagaagccactggagctcatgtttgtctacaactttaaagaacagactgaaaacaacagtgtgccaagtcgcttctcacctgaatgccccaacagctctcacttattccttcacctacacaccctgcagccagaagactcggccctgtatctctgtgccagcagccaagttgggggttacaatgagcagttcttcgggccagggacacggctcaccgtgctagaggacctgaaaaacgtgttcccacccgaggtcgctgtgtttgagccatcagaagcagagatctcccacacccaaaaggccacactggtatgcctggccacaggcttctaccccgaccacgtggagctgagctggtgggtgaatgggaaggaggtgcacagtggggtcagcacagacccgcagcccctcaaggagcagcccgccctcaatgactccagatactgcctgagcagccgcctgagggtctcggccaccttctggcagaacccccgcaaccacttccgctgtcaagtccagttctacgggctctcggagaatgacgagtggacccaggatagggccaaacctgtcacccagatcgtcagcgccgaggcctggggtagagcagactgtggcttcacctccgagtcttaccagcaaggggtgctctctgccaccatcctctatgagatcttgctagggaaggccaccttgtatgccgtgctggtcagtgccctcgtgctgatggccatggtcaagagaaaggattccagaggctagctccaaaaccatcccaggtcattcttcatcctcacccaggattctcctgtacctgctcccagatctgtgttcctaaaagtgattctcactctgcttctcatctcctacttacatgaatacttctctcttttttctgtttccctgaagattgagctccaacccc

SEQ ID NO: 582 - DNA, 1697 bp, Homo sapiens
cctggcggatggagacatgctgcccctgctgctgctgcccctgctgtggggggggtccctgcaggagaagccagtgtacgagctgcaagtgcagaagtcggtgacggtgcaggagggcctgtgcgtccttgtgccctgctccttctcttacccctggagatcctggtattcctctcccccactctacgtctactggttccgggacggggagatcccatactacgctgaggttgtggccacaaacaacccagacagaagagtgaagccagagacccagggccgattccgcctccttggggatgtccagaagaagaactgctccctgagcatcggagatgccagaatggaggacacgggaagctatttcttccgcgtggagagaggaagggatgtaaaatatagctaccaacagaataagctgaacttggaggtgacagccctgatagagaaacccgacatccactttctggagcctctggagtccggccgccccacaaggctgagctgcagccttccaggatcctgtgaagcgggaccacctctcacattctcctggacggggaatgccctcagccccctggaccccgagaccacccgctcctcggagctcaccctcacccccaggcccgaggaccatggcaccaacctcacctgtcagatgaaacgccaaggagctcaggtgaccacggagagaactgtccagctcaatgtctcctatgctccacagaccatcaccatcttcaggaacggcatagccctagagatcctgcaaaacacctcataccttccggtcctggagggccaggctctgcggctgctctgtgatgctcccagcaacccccctgcacacctgagctggttccagggctcccctgccctgaacgccacccccatctccaataccgggatcttggagcttcgtcgagtaaggtctgcagaagaaggaggcttcacctgccgcgctcagcacccgctgggctccctgcaaatttttctgaatctctcagtttactccctcccacagttgctgggcccctcctgctcctgggaggctgagggtctgcactgcagatgctcctttcgagcccggccggccccctccctgtgctggcggcttgaggagaagccgctggaggggaacagcagccagggctcattcaaggtcaactccagctcagctgggccctgggccaacagctccctgatcctccacggggggctcagctccgacctcaaagtcagctgcaaggcctggaacatctatgggtcccagagcggctctgtcctgctgctgcaagggagatcgaacctcgggacaggagtggttcctgcagcccttggtggtgctggtgtcatggccctgctctgtatctgtctgtgcctcatcttctttttaatagtgaaagcccgcaggaagcaagcagctgggagaccagagaaaatggatgatgaagaccccattatgggtaccatcacctcgggttccaggaagaagccctggccagacagccccggagatcaagcatctcctcctggggatgcccctcccttggaagaacaaaaggagctccattatgcctcccttagtttttctgagatgaagtcgagggagcctaaggaccaggaggccccaagcaccacggagtactcggagatcaagacaagcaagtgaggatttgcccagagttcagtcctgg

SEQ ID NO: 583 - DNA, 4163 bp, Homo sapiens
tttcgtacaggactggagggcttgaggaatgtggtggtccctctcttcgttgtttctgccccctgaggttgtgctttctcagggatatgcactctgcacttccattcctgcagtgaaattaactcgagcttggcagctcgagaggagaatgtggccactttccgaggctcagagtatctgtgctacgacctgtctcagaacccgatccagagcagcagtgatgaaatcaccctctcctttaagacctggcagcgtaacggcctcatcctgcacacgggcaagtcggctgactatgtcaacctggctctgaaggatggtgcggtctccttggtcattaacctggggtccggggcctttgaggccattgtggagccagtgaatggaaaattcaacgacaacgcctggcatgatgtcaaagtgacacgcaacctccggcaggtgacaatctctgtggatggcattcttaccacgacgggctacactcaagaggactataccatgctgggctcggacgacttcttctatgtaggaggaagcccaagtaccgctgacttgcctggctcccctgtcagcaacaacttcatgggctgccttaaagaggttgtttataagaataatgacatccgtctggagctgtctcgcctggcccggattgcggacaccaagatgaaaatctatggcgaagttgtgtttaagtgtgagaatgtggccacactggaccccatcaactttgagaccccagaggcttacatcagcttgcccaagtggaacactaaacgtatgggatccatctcctttgacttccgcaccacagagcccaatggcctgatcctcttcactcatggaaagccccaagagaggaaggatgctcggagccagaagaatacaaaagtagacttctttgccgtggaactcctcgatggcaacctgtacttgctgcttgacatgggctctggcaccatcaaagtgaaagccactcagaagaaagccaatgatggggaatggtaccatgtggacattcagcgagatggcagatcaggtactatatcagtgaacagcaggcgcacgccattcaccgccagtggggagagcgagatcctggacctggaaggagacatgtacctgggagggctgccggagaaccgtgctggccttattctccccaccgagctgtggactgccatgctcaactatggctacgtgggctgcatccgcgacctattcattgatgggcgcagcaagaacattcgacagctggcagagatgcagaatgctgcgggtgtcaagtcctcctgttcacggatgagtgccaagcagtgtgacagctacccctgcaagaataatgctgtgtgcaaggacggctggaaccgcttcatctgcgactgcaccggcaccggatactggggaagaacctgcgaaagggaggcatccatcctgagctatgatggtagcatgtacatgaagatcatcatgcccatggtcatgcatactgaggcagaggatgtgtccttccgcttcatgtcccagcgagcttatgggctgctggtggctacgacctccagggactctgccgacaccctgcgtctggagctggatggggggcgtgtcaagctcatggttaacttagactgtatcaggataaactgtaactccagcaaaggaccagagaccttgtatgcagggcagaagctcaatgacaacgagtggcacaccgttcgggtggtgcggagaggaaaaagccttaagttaaccgtggatgatgatgtggctgagggtacaatggtgggagaccatacccgtttggagttccacaacattgaaacgggaatcatgactgagaaacgctacatctccgttgtcccctccagctttattggccatctgcagagcctcatgtttaatggccttctctacattgacttgtgcaaaaatggtgacattgattattgtgaagctgaaggctcgttttggactgaggaacatcatcgctgaccctgtcacctttaagaccaagagcagctacctgagccttgccactcttcaggcttacacctccatgcacctcttcttccagttcaagaccacctcaccagatggcttcattctcttcaatagtggtgatggcaatgacttcattgcagtcgagcttgtcaaggggtatatacactacgtttttgacctcggaaacggtcccaatgtgatcaaaggcaacagtgaccgccccctgaatgacaaccagtggcacaatgtcgtcatcactcgggacaatagtaacactcatagcctgaaagtggacaccaaagtggtcactcaggttatcaatggtgccaaaaatctggatttgaaaggtgatctctatatggctggtctggcccaaggcatgtacagcaacctcccaaagctcgtggcctctcgagatggctttcagggctgtctagcatcaggggacttgaatggacgcctgccagacctcatcaatgatgctcttcatcggagcggacagatcgagcgtggctgtgaaggacccagtaccacctgccaggaagattcatgtgccaaccagggggtctgcatgcaacaatgggagggcttcacctgtgattgttctatgacctcttattctggaaaccagtgcaatgatcctggcgctacgtacatctttgggaaaagtggtgggcttatcctctacacctggccagccaatgacaggcccagcacgcggtctgaccgccttgccgtgggcttcagcaccactgtgaaggatggcatcttggtccgcatcgacagtgctccaggacttggtgacttcctccagcttcacatagaacaggggaaaattggagttgtcttcaacattggcacagttgacatctccatcaaagaggagagaacccctgtaaatgacggcaaataccatgtggtacgcttcaccaggaacggcggcaacgccaccctgcaggtggacaactggccagtgaatgaacattatcctacaggccggcagttaaccatcttcaacactcaggcgcaaatagccattggtggaaaggacaaaggacgcctcttccaaggccaactctctgggctctattatgatggtttgaaagtactgaacatggcggctgagaacaaccccaatattaaaatcaatggaagtgttcggctggttggagaagtcccatcaattttgggaacaacacagacgacctccatgccaccagaaatgtctactactgtcatggaaaccactactacaatggcgactaccacaacccgtaagaatcgctctacagccagcattcagccaacatcagatgatcttgtttcatctgctgaatgttcaagtgatgatgaagactttgttgaatgtgagccgagtacagcaaaccccacggagccgggaatcagacgggttccgggggcctcagaggtgatccgggagtcgagcagcacaacagggatggtcgtcggcattgtggctgctgccgccctctgcatcttgatcctcctgtacgccatgtacaagtacaggaacagggacgaggggtcctatcaagtggacgagacgcggaactacatcagcaactccgcccagagcaacggcacgctcatgaaggagaagcagcagagctcgaagagcggccacaagaaacagaaaaacaaggacagggagtattacgtgtaaacatgcgaacactgctcacacgcgagttttcacagttatttctatccacgcctatgaatctttggacggtgagatctcacagatgtcagaactgctggaactatgaaatggggtatataaccacgactctggtggggaaaaccgttttttaaaggacacacacacacacagcgatgcatctctctcctaaagctcagccacggctgcggcaaggttccagcggtcgctgggagacagaaaggttttgtgccctgctgtatcataaagcacacacttagcgctctggagccggacggtggctccaccacttccgcaggcctggaaacttccttctccggaggaccttttactaaaaggtagaagacttcatggcttacttgttccataactccaagtgagtctgtaatgtttgtgaagcttgactgtaaccatgttttttctgtttaattatgtaaaaaacaaaactacaaaaaaaaaa

SEQ ID NO: 584 - DNA, 4163 bp, Homo sapiens; identical to SEQ ID NO: 583

SEQ ID NO: 585 - DNA, 635 bp, Homo sapiens
ggctgaggcccacgtttttaccccagcttgaggctgaggtgggctctgtgctcctggtgctgccaagcccttgcctgctatccacaggcctgaggtgcaggcctccctcagacagtgacgggttacacatggggtccctgatgccactcagacccctggcactccacactgcccttggggctgctctgaacttctccttgccttgtgagtggtcaacactgcccagtgcaagtgaggctggaaggctttggggacctccaagttttcagtaaccctgtgttaccccaagggaattgttttgcccacagattttagcaggttggagctttcaatctgtcctgttttgggggtttgtggcttagatgctgggatgagagaagccacctaaatccaaaggaaggagtttgcagcgtgttgcatcagccagccagcagacacccagctgtcatttgcattctcagcaacaaaagccttggcccctcatgactatgggtgtcacctgccctgtgtggcccagggccaggtggaagccatccatgactgagtaaaatcagagtagcatcctgctctgctctcctgtttgcaagggtaggagttggctgaaaaccagctgaagagtggcaagtgtgaatgct

SEQ ID NO: 586 - DNA, 1802 bp, Homo sapiens
cccacgcgtccgcccacgcgtccgctggggctgagagttcacctgtctcaggaaccacctgagcccacagatcctgtgggcagcggccagggcagccatggcttgggcaagtaggctgggcctgctgctggcactgctgctgcccgtggtcggtgcctccacgccaggcaccgtggtccgactcaacaaggcagcattgagctacgtgtctgaaattgggaaagcccctctccagcgggccctgcaggtcactgtccctcatttcctggactggagtggagaggcgcttcagcccaccaggatccggattctgaatgtccatgtgccccgcctccacctgaaattcattgctggtttcggagtgcgcctgctggcagcagctaattttactttcaaggtctttcgcgccccagagcccctggagctgacgctgcctgtggaactgctggctgacacccgcgtgacccagagctccatcaggacccctgtggtcagcatctctgcctgctctttattctcgggccacgccaacgagtttgatggcagtaacagcacctcccacgcgctgctggtcctggtgcagaagcacattaaagctgtcttgagtaacaagctgtgcctgagcatctccaacctggtgcagggtgtcaatgtccacctgggcaccttaattggcctcaaccccgtgggtcctgagtcccagatccgctattccatggtcagtgtgcccactgtcaccagtgactacatttccctggaagtcaatgctgttctcttcctgctgggcaagcccatcatcctgcccacggatgccaccccttttgtgttgccaaggcatgtgggtaccgagggctccatggccaccgtgggcctctcccagcagctgtttgactctgcgctcctgctgctgcagaaggccggtgccctcaacctggacatcacagggcagctgaggtcggatgacaacctgctgaacacctctgctctgggccggctcatcccggaggtggcccgccagtttcccgagcccatgcctgtggtgctcaaggtgcggctgggtgccacacctgtggccatgctccacacaaacaacgccaccctgcggctgcagcccttcgtggaggtcctggccacagcctccaactcggctttccagtccctcttctccctggatgtggtagtgaacttgagactccagctctctgtgtccaaggtgaagcttcaggggaccacgtctgtgctgggggatgtccagctcacggtggcctcctccaacgtgggcttcattgatacagatcaggtgcgcacactgatgggcaccgtttttgagaagcccctgctggaccatctcaatgctctcttggccatgggaattgccctccctggtgtggtcaacctccactatgttgcccctgagatctttgtctatgagggctacgtggtgatatccagtggactcttctaccagagctgaggcaagaccactgggaggcctgagagtgggccagctcgctgctcaggcgaatttctcatttcaagccactggggaaactgaggcaaaaccatacttagtcatcaccaacaagctggactgcttagctgggctgttttatcttccctgagtgcctgggtctccctccctcacttctgccctttcccttcctcctcctcttctcctccctcttccctcatctcccccctccttcctctgccccaccccagcggggagcagactgctcctccaggctgtatagacctgccctcttgcattaaacaacttctcttgagctgcaaaaaaaaaa

SEQ ID NO: 587 - DNA, 397 bp, Homo sapiens
cccacgcgtccgcccacgcgttcgcccacgcgtccggttgaactcatgataggtgcagaaatttcagtaaaaataatgtgacatcggcagagctgtcatagatctgggatatggctggaaggacatagagtaaatgatcggtctggttcatcgctaaaggagacttaggaacctagatgaagttggtacttctgagaaagacatctctttctgttttcactactctattctcagtatccagttctcagtacccagttctcagtacctctatttgtaatactcctgtatttagtactttgtttttagaggcctgttctgttaaccctcttcctagtaccgtatttttagtactgctatactcagttgcctgtctgtagtacccctgtacgtagtactc

SEQ ID NO: 588 - DNA, 1830 bp, Homo sapiens
agtggcattcagcattattgcccgagctccacccactttcagatcagcctgggcatcagattcccataggagcgtgaaccctactgtgagctgcgcacttggatctggattgcgctctggtgagaatctaatgcctgatgaactgaggtggaatagtttcatcccgaaaccttcctccccaacacggaaaaactgtcctccgtgaaacctgtcccaggcgccaaaaaggttaggtacttgctgtagggccacctgatcttttctccagcttctgtgaggttggctggcagtccctgaagactcctgcctgaggcctctgcctgaaccctgtcctcagggggccagaagcaaactccagccctccccgtgtctactgctcgctgaggaagccgcaggtgcacactggatccacaaggcacagaaccatcttggccctcggcaagcccccgcttccgccagggcagacggcctcagggagtggcagccggagtctgaactgtcctgggggaccaagcaggagcttaagatgggcaagacctggggccctgggcagacgcatcaaagcaggcagaagcaggcatggccagcaggaagaccaagaagaaggaagggggtgccctccgggcccagagagcctcatccaatgtcttctccaactttgagcagactcagatccaggagttcaaggaggcattcacactcatggatcagaaccgagatggcttcattgacaaggaggacctgaaggacacctatgcctccctgggcaagacccaaacgtcaaggacggacgaactgggacgccatgctcaaaaggagcctcggggcccatcaactttcaccatgtttctgaacctgtttggggcagaagctgagcggtaccgacgccgaggagaccattcttaacgccttcaagaatgctggacccggacgggaaagggaaaatcaacaaggagtacatcaagcgtctgctgatgtcccaggctgacaagatgacggcggaagaggtggaccagatgttccagttcgcctccatcgatgtggcgggcaacctggactacaaggcgctcagctacgtgatcacccacggggtaggagaaggaggagtgagacccagccgggtcaataaacctggacgcttggaccctgcctgcgagtctgcccgggcgggaagggcgcgtcggtggctgctgggccttgcgcacggggagtcgctcggtggcaggctgggtggggactcccgtggccctcctggggtcctctaagcgaggcccccccttcgccgtgcaactccggaattcgccgtgctgggccccaggaccccagccctttccttgcttccccctcggtccacacccggccctgagtctgcgaccccacggcgttacgggtggaggggggctccccagactcggcctgcaggcgccggtatggggtgtggaagaagaccgccaggatgcagctgaagaaggtgcacaggccggccatcagcagcagagacactgtccagtcaagtggatcctccccctgctggcaggtggacaaggacggctccgagcgtcgcacagtcagtgccgtcattgccagcatgatgagtattccctcggcctgccccagcacaaagatcatgcctgtggcagccccctcccccacggggaaggaacactcgaccgccaactccatggccacggggcccaccgagaagccaaacagcccgagcagcgagcaggtggcagccagggcaagggtctgtccctgcagctgggacaccagggcaaagggcacgcaggccagagagaacaggcacaggccaatcttggtggcctcagt

SEQ ID NO: 589 - DNA, 876 bp, Homo sapiens
cacttttcgcgtcgacacacgcgcgcgcgagcagtagcctatctgtagacagttctcatgaacagctggcaggccatcttctttgaacagatgcgtgtggctgccctgtgggatgattacagcactatggaactaatattctttgaatgatgcgctcttattatttgaaaaatcaggaggcctggtcttcaggattcccctcctcttccactccccatcctccttgagagcagtatatactgggaatgcctgtcaggcgaccttccacttacagcccatggcagctgatagcatttctagtcgattttggtccagaattgaggcacatataagtggggcaggaccttgaagaatgatataattagttagtcgagtgttttatgttgttagctaagcgctatgctaagtatttcatttattttatcttctttaatcctgttttaatccccattctacaaagaaggatcctgagacttggtgagatccatattgctggccagtgcagagctgggtccctccagtctctgcctttacctgccaacctgcatagcatcctggatattcttgcatagccacatagacatttgtttgtacttttagtatgtgttgggtacagtgcatgtttttagctattttctcaagcatctgggaagttctaactctgttttattgatgaggaaactgggtcttgaaatccaggcctatacctgtctgagtgtaacgcccagcaagaaagtgggacattggaaagagcacaaggagggaaaccctaatacctcggattggaaactggctttaccgtgaaccaacccttgggtttttgggcacgcggcttcaaccctgttgggccttaaccttctttatcaagaaagaaac

SEQ ID NO: 590 - DNA, 2295 bp, Homo sapiens
ttcaatttggaagtctcagaatttttaaaagatgtgttactaaagctacttataagtcatctaaaatcctaccaccttaggcaaccttttaaatttttgcttatttcatataatatatatttatacatagttgttatagagtaagttcctatttattctgtattttcacatgacgtataatttcataatttccccataatttattagactgctttctacatatctaatagacactcctttaattttggacattttaagttttaaggcttttttcctactccacgatgaatgaatgtaccaatttcattctggcattgccaacattacttggtggtagggttttttcccctttctgctaccttagcaagtataaaaggttactttaatttacatttctttggttatatcaagggtggggaattacttatgaaagtttaattttaaagcagataatatttcaaatattttctttgaaatagaccatttgtcctgccttgaagtatgttagtacattttaagaaagtcagtgggttaaggagtcagtgctgttagtattcatgcttaaaacacttcccttctacctaccctaataaatgaggggctcaagagaaatatttctaattctctagcgacatggctaattttttttggcataaaaaatatagtctgaatattaagcattgatttagtacccatggtatcgcagatattatacagaacacaaggcaaatgataatcaggtgtaagcataaaagcattctcacgttaccccgatattttataaagcaaagctattgtatacccttttacttaggaaattgaagctcaagaaggtgaagatgatacctttctaacagcccaagatggtgaggaagaagaaaatgagaaagaagggagcctagctgaggctgatcacacagctcatgaagagatggaagctcatacgactgtgaaagaagctgaggatgacaacatctcggtcacaatccaggctgaagatgccatcactctggattttgatggtgatgacctcctagaaacaggtaaaaatgtgaaaattacagattctgaagcaagtaagccaaaagatgggcaggacgccattgcacagagcccggagaaggaaagcaaggattatgagatgaatgcgaaccataaagatggtaagaaggaagactgcgtgaagggtgaccctgtcgagaaggaagccagagaaagttctaagaaagcagaatctggagacaaagaaaaggatactttgaagaaagggccctcgtctactggggcctctggtcaagcaaagagctcttcaaaggaatctaaagacagcaagacatcatctaaagatgacaaaggaagtacaagtagtactagtggtagcagtggaagctcaactaaaaatatctgggttagtggactttcatctaataccaaagctgctgatttgaagaacctctttggcaaatatggaaaggttctgagtgcaaaaggtagttacaaatgctcgaagtcctggggcaaaatgctatggcattgtaactatgtcttcaagcacagaggtgtccaggtgtattgcacatcttcatcgcactgagctgcatggacagctgatttctgttgaaaaagtaagcttccctaactgtttatcaaagcaagtctaatttgatggctagttctcaactcatagctgttaacagtagcagggagtagaatttgcagtgatttttaatttttatgtatttgtagtttttactctccttatatttttcctatcgtttccaaattttctgccattagcacacttcttataatcacaaaaatgtaaccatatgtacaaattgtttttctggttcgaacctttcaggtaaaaggtgatccctctaagaaagaaatgaagaaaagaaaatgatgaaaagagtagttcaagaagttctggagataaaaaaaatacgagtgatagaagtagcaagtaaggatttatttttatttatttattttgataagcagatagacttttttggtacattatgaagtactcattctgtttttttgtctggggcggtatggtcaggacacaagcctctgtcaaaaaaagaagagaaaagatcgtctgagaaatctgaaaaaaaagaaagcaaggatactaagaaaatagaaggtaaagatgagaagaatgataatggagcaagtggccaaacatcagaatcgattaaaaaaagtgaagaaaagaagcgaataagtatgctatacatcttttcaatccctttctaatgcattctactacttaatttttac

SEQ ID NO: 591 - DNA, 869 bp, Homo sapiens
atgcctgtccagactttgccaataggagcacctttaagctggcatgtggttgtaacagcctaacccgtcttttttagagtgataggccatgctaatcttactctctgctccagccttgaaactggccattttttcaaggagccagggttctttttctttgggaacagttaccagcatctgagtatgctcatcggttcggggtatctctgcttctgtgcccttcagtggactgagctaggaaatgtatgtgtgtgtgcacacatatgccgttgcacacacatgcaggtttcagggatcacaagtccggtccatgtccacatccatagggttctttcttgccttatccatttcacctcttagagcagaggactttcaccatttctattgaacatgagtataatatgtagtccttacctaagaggattctgtggatcttctctggggttctcaggggccatggaacatgtcagagcaaatgttggaatggattacccagaatgtgagtagtgtgagtggggcactgttggactcagtcccaaccccctaacgcgagtttgcatgaaaaattcatatcttacttagggccatcctaactttcttgcttcccaaagggagggtagatcaaaacataggggaaaggaggggtcataaacttgtttgaaggtacccgagggaaccccagactttataggtggtctaatctaaggccgggtgagtcgagcacatatacgaagccttcaacatagggaaaaaggtgcaggactctcttacacatgactagtaaaacggcgttagctatcatggtaccttccaacgaccagccaccatcccgtcttgtactactgaagcctcttcctctagaaaacacg

SEQ ID NO: 592 - DNA, 862 bp, Homo sapiens; identical to SEQ ID NO: 120

SEQ ID NO: 593 - DNA, 1400 bp, Homo sapiens
gtgtgaggccatcacggaagatgctgctgcttctgctgcttctggggctagcaggctccgggcttggtgctgtcgtctctcaacatccgagctgggttatctgtaagagtggaacctctgtgaagatcgagtgccgttccctggactttcaggccacaactatgttttggtatcgtcagttcccgaaacagagtctcatgctgatggcaacttccaatgagggctccaaggccacatacgagcaaggcgtcgagaaggacaagtttctcatcaaccatgcaagcctgaccttgtccactctgacagtgaccagtgcccatcctgaagacagcagcttctacatctgcagtgctggagcggatagcggcacccaagagacccagtacttcgggccaggcacgcggctcacggtgctcgaggacctgaaaaacgtgttcccacccgaggtcgctgtgtttgagccatcagaagcagagatctcccacacccaaaaggccacactggtgtgcctggccacaggcttctaccccgaccacgtggagctgagctggtgggtgaatgggaaggaggtgcacagtggggtcagcacagacccgcagcccctcaaggagcagcccgccctcaatgactccagatactgcctgagcagccgcctgagggtctcggccaccttctggcagaacccccgcaaccacttccgctgtcaagtccagttctacgggctctcggagaatgacgagtggacccaggatagggccaaacctgtcacccagatcgtcagcgccgaggcctggggtagagcagactgtggcttcacctccgagtcttaccagcaaggggtcctgtctgccaccatcctctatgagatcttgctagggaaggccaccttgtatgccgtgctggtcagtgccctcgtgctgatggccatggtcaagagaaaggattccagaggctagctccaaaaccatcccaggtcattcttcatcctcacccaggattctcctgtacctgctcccaatctgtgttcctaaaagtgattctcactctgcttctcatctcctacttacatgaatacttctctcttttttctgtttccctgaagattgagctcccaacccccaagtacgaaataggctaaaccaataaaaaattgtgtgttgggcctggttgcatttcaggagtgtctgtggagttctgctcatcactgacctatcttctgatttagggaaagcagcattcccttggacatctgaagtgacagccctctttctctccacccaatgctgctttctcctgttcatcctgatggaagtcctcaaacaccatttccatacccaggcattctgggtccccactggagggttagtctgaagggcaatggctgggctttggaaaaccag

SEQ ID NO: 594 - DNA, 380 bp, Homo sapiens
gggagttgaaggccactttcttggttggccctaagtggttgagagttcacaaacaccactccctccctgaggactaacagccattgactactggtctgcttgttaactgactctccagagctccccatgagctatgagtgtgggacttcacctgggatttcttgcttggtttcttccctttctaattcccacttctccccttcccttactatttcaactgggagcacttcctaatgaatcacttgcactttatgcttggctcagggattgcttctgggagaacataacctaaaatgtccaacaataaggaacagttaatgacatccatccaacacaatatcctttggctgttaagaacctatctctgaagaaaacttaac

SEQ ID NO: 595 - DNA, 748 bp, Homo sapiens
tagtctatctgcagagctacctctacattttaacttaggttagttgtttcccttggaatgtcttctccgtgttttcaatgttttcacctatgttgtaccattaaggtctggcccctgtgccaccacctacagaaagcctttcctgatttctctattcatgtcttctctgaaagtgatctttcttctttctgtgaagtccaacttttaaaaatatgtttacaaaaatacttcttaggatcattaatgcattgttcctaagtcagagttctctgtgaatttattctatacaatcttctagtgctagtatataaactccttaagaacaagaatttgctcatgatagtagtcccctgcagtgtgtagattacataagtgttgagtaaatcttggagatcaggtatcctcattcaagaggaaaatgaataagagatccagttcagagacctacagtgagtgctctccgctgcaggcagggattgatgagctgcttcaactcttaccacccaccactctcaatcctatactctaactaatgaactctgctcaccgttgtccaagtgagttgaccctttggcctttccatgccgtggcctgtgcaccttcctgaacttggaatgcctttactctttgaaaaaaataagcctctgggcaaaaataggcctttgtcctttgggggttcctgggggttggaaaaaaatggttcctttttttttccccggggccggagaaaaaccccaactaagggttc

SEQ ID NO: 596 - DNA, 356 bp, Homo sapiens
tctttttttcatttttgcttatttatttctattctttgttgatatggaaaaatattttcacacagttatgatcaagttgtgccatcaactttataacgtatatgtgtgctttttccatttaattgttttgggagatattgctatagactacattattgttcccaatatttcctacctctctatatctataccctttgtagttactaacattagaggtagagatattttccacccctgtaatgtggccttggtcatgtgacttggaatgttagtagttctgatgtgcacagaggctgtacatggactttcagcattgggtttactctctcgggtttctgctgtttccatacaaagaa

SEQ ID NO: 597 - DNA, 564 bp, Homo sapiens
caatctgaagatatggttggaatatttgtctactccctgaatatttgatatagttcatgtttttaggtgtgataacatatggctatgttttttaaaagacatatttaaaagacatacctatccatactgacataaatatggctgaaaagatatgcttgtgtgatgtaatttaaataatttggagggaggatcaggagttaatgttgaaactcaattggctttgagttggttataatcaagcatgtgagcatttcttatactggaacctttacttttgcagatgtttgtaatgttttatgaaaataaaagaagagaatacctccaagacatgctgctttcttatagattattagttgcaatcttagttttgctgaagaaattaacagaacttaatacaattactcttatttgcaagtctataattttctaaacctaactctgatgcagtcctactcctaatatttacaaggcctagaacaagagtatataaatggcagcccacattctacgggtctaaatatatacaagttataaaccaagtcagcaaaataaaatgccatgtat

SEQ ID NO: 598 - DNA, 376 bp, Homo sapiens
atggcttatttaaaaagtagaatgtttatgtatttaaacagataaaatttagaatgattttaattccagggtaaaatctgctccgaccagagagaaaaaactaattcatatatgaatatagtatttgtaatcctcttgtttaaagacatgcaagttctagaagtatttgtactgcttaatgttttaacaactctaacaataatagcagcgggcatactttgtaccagtttttgctgtaagccttttatatatattaatcctctttaaaaccaccctatcaagtacaagataataatttgatatggttgatgaagcaactgatgggaaaaaagagaggttaaataatttgccccaaatcttattaagtgatgtagcc

SEQ ID NO: 599 - DNA, 739 bp, Homo sapiens
ctggtactagaactcacagaactgccacagaaggctgaacagtcctgggcttttcacatgatcaggttcgcacttccatggttctcccaaatatggctttctaaacaaacttggactaggctcactcacttggcatttctcctgcaggaatgcaactcaatgttctatccaaaggtttcaagaacgacagtttttggatgtttatttaatcctctctcaagccgtgtttgttttgaataaatggcaaatgtgattagtaaatggaacattcattttgttagactgcctctaaactccagatataaatgggctggattttacagcttattttaacatttcctttttcctataccctttctctgatcagctcttcaacggtgatataatttcttttaatgcaaatgtacaaaacaatgttagtcctgacttttggcaagcagttcacaagtttgggtgaaaagacattgctcttgaaaaacaggtcatttttagatttgctatggctttccttctcactaggacatattgtgctgatgcagaacaatggagctaaggaggtctttagcttggcttgcatctatcagaactcagcagtacttttctttttgaggttcaaaggtattggcccaaaatttgggaaatgtggggtaaatccactctacagccccccccaaaacaccccctgggtttggggggggggaaaaaaaagggaatttggccgggcgcgggcgttaaaaaa

SEQ ID NO: 600 - DNA, 379 bp, Homo sapiens
ctattttgagttctagattccagtcttagatgaccaacttctttcatcttttactaccacttctaccatctctcttttccccctcctcaaaaacgcatagcttcaatattcataagatcatcatcatcatccttttcttcaacagcattttcttgtatcctagagattaccttaaaataaggaattggctacaaagtaataccttggaaagagaaatagaatggatcacctctataaggtgcttatgtaactctggaactacgtttatatttccattaaccacaaagtccacatgagtcatacttatttttctgtctcaggctactaaaatagaacatgttctctagaggagaacatcaaggagttcttttatttgtcg

SEQ ID NO: 601 - DNA, 2038 bp, Homo sapiens
tttcgtcttggccgcgcagtgccggaacccggctgcagcggtgggaaggcgggggcgtgccggcccagcggggagaggcatctgcaggggctgctgagagtaaatacttggcgcctccagctgctggccaaggagacagatggagctcaagttgggagatacgccctgagagccgatgatagacacaagtccagatctcggattttgatactgtatgttccctgggttcctgagagaggacattgaggagtaggagtcggcgattaaggagatcggtacaattgggaagcctcctgtcagagcttccagcaatttcctcatcagaggtggacaagccctatgggctaagacagagggtcctcagaaaggagtgcggacgccgtcatgctgcagcagctcctgatcaccctgcccaccgaggccagcacctgggtgaagttgcgtcatccaaaggcggccacggagcgggtggccctgtgggaggatgtgactaagatgtttaaagcagaaggaactgttaaccttcaaggacgtatctgtggacttcactcaggaggagtgggggcagctggcccctgctcaccggaatctgtaccgggaggtgatgctggagaactatgggaacctggtctcagtgggatgtcagctttccaaacctggcgtgatttcccagttggagaaaggagaagaaccatggctgatggagagagatatttcaggagttccaagttcagacttgaagagcaaaacaaaaaccaaagagtcagccttacagaatgatatttcgtgggaagaactacattgtggcctaatgatggaaagatttacaaaaggaagcagcatgtattccaccttgggaagaatctccaaatgtaataagctagaaagccaacaagagaaccaaagaatgggtaaggggcaaatccccctgatgtgcaagaaaacattcactcaggagagaggccaagagtctaatagatttgagaaaagaattaatgtgaagtcagaagttatgccaggaccaataggtcttccaagaaaaagagatcgtaaatatgacacacctggaaagagaagcagatacaacatagatttagttaatcattcaaggagttatacaaaaatgaaaacctttgagtgtaatatttgtgaaaaaatcttcaaacagcttattcaccttactgaacacatgagaattcataccggggagaaacctttcagatgtaaggaatgtggaaaagcctttagccaaagttcatctcttattccgcatcagagaattcatactggtgagaaaccctatgaatgtaaggagtgtgggaaaaccttcagacatccttcatcgcttactcaacatgttagaattcataccggggaaaagccctatgaatgtagggtatgtgagaaagccttcagccagagcattggactgatccagcatttgagaactcatgttagagagaaaccttttacatgcaaagactgtggaaaagcgtttttccagattagacaccttaggcaacatgagattattcatactggtgtgaaaccctatatttgtaatgtatgtagtaaaaccttcagccatagtacatacctaactcaacaccagagaactcatactggagaaagaccatataaatgtaaggaatgtgggaaagcctttagccagagaatacatctttctatccatcagagagtccatactggagtaaaaccttatgaatgcagtcattgtgggaaagcctttaggcatgattcatcctttgctaaacatcagagaattcatactggagaaaaaccttatgattgtaatgagtgtggaaaagccttcagctgtagttcatcccttattagacactgcaaaacacatttaagaaataccttcagcaatgttgtgtgaaatatactaaacatcaaagaatttatgttggagcacaagattttaaatcagtggttccctgatccctcaaaaatccatttgtttttggatttccaaaaacgaacattaaaaaaaaatggtttggcaaaaaaaaaa

SEQ ID NO: 602 - DNA, 868 bp, Homo sapiens
agttgttacaccatctaccctaattcctgaattccaaaaccttggagtcttctttgatttctttctcatgttctccacgttagtaggccctgctgctttccctcctcagtgtatgctaaactcatttaactttctccatttttactgacaatgcacaccatcatactctgtcatctatgccactgtaacacattcttaaatggtccctctgttcaactgttgcccctgcaattcattctatatgtagtggtgaaagtgaatacatataaacacaaatcaagttttgttacttgatggaaaccctccaataatcattcactatgaataaaatccagaccttttgctatgaccctcaagaccccatgtgacctggtccttgcctacctctctggccttggctctcacaattctgtctgtactgatattcaccagtcatattggttgtctcttttttcctaaattaagcactctaaactcatttctgcttcagagactgcagatgccatgctctgtgccggaaactctcttttcccttctctggttagctccttcccatcattcaggtttcagttcaaatgaggcttctctgaggactgatctattatttgccacagccattctttattctctatggcatcctccatattattttctttataatacttcttaatgtgtgaataattactgtgtggatgacttccttacatagttatttatttgttaatgttcttgcttacatttcattgtcagcttctagaagaagagctctttaagagcagtgaccctgtctgtcttgatcatggaacaaagactggtatatccagatgttcaataaatattttcctgtatgaatacatgactatgtttt

SEQ ID NO: 603 - DNA, 1001 bp, Homo sapiens
cccacgcgtccgaccaagtgaacttgtaaagaacatgtgttctgcagtttttaggtgttctttatatattaagggggttgataatgttgttcacatcatttgtgtatgggctgatttttattttgtttgatttttattttctatcatttgttgaaagggatgttaaaatcttcaactgtaatggtgaaatagtattgtttccatttaattctgttcatttttgcctgatatgtctttatatacacatttaagattatgtcttcctgatgagttgtgaattataacattatgaaatgttattctccggaatattattctctccttacagtctattttactcaatattgatatagcaactccatcctttatatacttactgtttacatggtgtgccttttcagaagcatttactttcaattatagatagcatatagatgagacttgtttttttttaaatctattctgaaaatttctgattttattattaggaatatttaggggaaatgtttaataaattaatattttgggtttttttttctgccatttttcatatttatccctcctcctcccccatgaaaaataaaacatcttttcttaaaactagtacgaaggataaaaatacgcttcccctctcctcgtgggctcctttctcagctctgtcttctaacaactctcaaacccccgtttcataatttcctctagacccttcactcttatgggctccaattcccgacaatagtctacatccctgccattacccttcctactgcagcctcactgaagcctaccttcacatcacttttgctatatcacctgctctaaccctacctactatcagtccagctactctttcattagatagattcttcataatatacccctcgctaaacctacaccctagcgccctgactactctccccgcatcccatccacactccgcacacatcgtcccacgactaatacgcatgactacctgcataacctcactctctcttaatttc

SEQ ID NO: 604 - DNA, 1301 bp, Homo sapiens
  misc_feature (1)...(1301): n = a,t,c or g
cacgagagaaattgttggcaaattgtgaaatttattgttgtataatgctaatagatcagttgtcctgatgtctttgctgtaatgatttctttataaaaatgatcttaaatctgagctccctaactttagtttttgcctggaattacccattacatttgatgatatctctaaatgtcagttgtagctgttactctgatgatataagtggaatatacagaagcgtacttagacaaaagttaggttaatatctgaactacttcctccttgtgtatttaagagaatattgacttaagtttctagaatcctcaactaatcctaagtttattttctttgtctagaatactatgctgtttttgtttttggaaggaagagatataggcatagtttcctgctctcaaggagcttcaaaggctgtaccagtggggatgccattggtatttttagctggatagttgttattcagaaaagcaggacaagtaattatgattcctggtccgtacctggtaatgccagtaatgttaactctagctgggtgttgacatctggtcatttacttggcaatctttcttttttttttttggcgtttggggaaagggtttaggacttcaaagacggcccgggtaagtcaacgcagggcccgcacaggggtgggttcgctccggggttcccgcgctgagcgggcacaacaccgatttgtggcgcgacggggatggacccgcggcaaggtgaggattgcatcggggcgccccggaccggggggcactacaccctccgctgccgtccaagaccgcgagcatcgccccgcggacgaacggagcccgggcgcatggggcccccccgccaggagccgccccaccacaccggggcgcgacgtctcggcgcgggcggacgccgagcacgggcagggcgatgtcgttattcggcgcgtgcccgccccgcgagggcgctgcctccactccgggcgaccgcatccgcggcgactcctcccgctcgctccccctctcgcgtacaacgactcggcgacaggccgggacgcgggcacctgatagtcgcgcacggcgtgcactcggcgcacaccgactccgcgcgggtggataaagggaaactcggccaacgacctgctgtgcccggcgggcgcgctagagcgcggtcagggggatcaccgtcgcggcgcgtgcacgtatgagcggcgcggagacgcgcgcggcgttcgccgcgcgacccgctcactacgtgtcgtggcgagagaatatncgtgcataggccggcgggcgcctaccccatcggcaacaactatggct

SEQ ID NO: 605 - DNA, 375 bp, Homo sapiens
cccacgcgtccgaagaatggtttccttactaaatgagaaaagttgagccctttccactaaaatggttaaaataaaaacttcatgtgtttaattctggttatctggaaaattcactatgcagaacttataatgttaaataaacgagttgttaataaatgtagatcatgtcttatccaaaaatgcctatctacatgtcatagtacagtcattgttttatatcaatgcagagaggaagaagctgtgatgttaataaagttgaattttaaaatgaaaatccaaagaactatatgtatataggccaaataaaaagttacttgattacttaataatatggattaaaatgagtaatcactgtaattcatatattcaagaagg

SEQ ID NO: 606 - DNA, 398 bp, Homo sapiens
cttacatcagtttaaaatgagttaccatgaacaatatgaacttaaagagacttttactatttttggctaaaatgtttagcgcaatcttttccttacctactcatccttctcatttccccatttccatttatgacaacattggtcattggcctcagtcaccgaaagtcaggaggaaggaaggaaatgaatatttattgaaccccaatatgtgccagaccctggatttaacacttttagggataggagattatttaacctcaataacctctccctgagggcaggaagtggatttatagatgcggaaacagaggttctgcaaagtcaattgactttgcctggtaagaggcaaaaccagcatcctttatttaggcaatccaagtgatgttcatgtcctctgg

SEQ ID NO: 607 - DNA, 1121 bp, Homo sapiens
cccacgcgtccgatttgatggagaaaagctgctattataaagcctgatgtggacttttttcatcagtgtcactcaagcaagttggcctttaaagacagttttttactgcttaatatataggagttttcttgttttatttgttcattttcctaattgaacaaattatggctcctcttcctagcctcactctaagaccttggtgtgtcctcatgttactggacctgtgggctgcatttggcacaattactccctccttgaagcactttcatcacctgccttccgggacacagcactccctggtttttgtcctgtctctgactcttcattctcagttgtctttgctgatgggcacctcagctgtctgtctttctgcctgtttttcttctctcagcactttccctgggtggttgcttatcatctgcacactgatgatttaaacatagagtttttgcctgtatctctccccctaagtctaggcttatatatctaactgcctgctcagtacctctatttggatgtttaataggcatttcaaattggaatccaaccttttgttcctacctctgcagccctggtccaaaacaccatcatctcttgcccagcttattacacctgtagttaccttgcatctgggctttccactttcatccttgcccctccagtctgttattatagttgtgatagggattgtatcaaaacttgtcactggctactggttctgatgagtaaacttaaaccctctcagggtccccatacccccccagctggggcccttcctccttggcctcccctgaccacttgtggattgggcatctggtcgctcattcaggcaaagggtcattctcagacctgagggcctcccctagaggcgacctgctggtccctcctagagcgttcgcacaagccactggttcttagttccatatagtagcctctgggcctctcaagggtacccccgtgagcatccccccgatctgacccctcctcgggatattgccctaaggaacgaaagaagctgcttgccccaaaggagtgttggctcgatttggtgggcctgtcttgaatcgctcccatcttagtggaagaatggacaagtgggtgcaggcgatcgggatggcggc

SEQ ID NO: 608 - DNA, 774 bp, Homo sapiens
cctcccgggtcgacccacgcgtccggtaagcatgccccacactaagtataactaatatatagtaaaacttgcaatatagttagcataactagatatttatccctgttgggatttcacagttgcaccttgcctgttatttatattttcctaaattattagaagattttagaaaaagattctgtgttatgaatgcccaggtgagagttaattactgtatgcattttgacacctatgctgttaaaaagctgttgttgatagctgaaccaagaattggtctttgaccttctgggcacagttaatgagctactaatcttgtagggcatgtttctgttggacctctgcctgggctcattgtcagtatttattgacactcatccatgtatgcatggagggtttaaatgcagtcaagactggtgttctccagccaagctgttgctttcagcattcacaaaaacaaggtagaaaggagacctggacaacaagcacaggcacttggacttttaaaaattattttattttctgttttcccctgatatgataaatagtggtctaaagacctcagatttcctttattcatatatggttttcctttttaaaaatattattttcagtggatttgcttatggacacatttattaccaggtttattcaaaaattaaacatttgttcagcatttgtgtcctaagctgacagtctttaaatcttatttttcacagttatattggaagttatattagaagatgaagcggcttcctaagcccagtacaaatctgc

SEQ ID NO: 609 - DNA, 1145 bp, Homo sapiens
  misc_feature (1)...(1145): n = a,t,c or g
cccacgcgtccgcccacgcgtccgcccacgcgttcggggtttttataaaaatggattcagggtctgctgaaataaattttttttaaaaatttcagtccataaaccaaacaaaaatatctgtcctggaatgtgatcaggaacaaaccagaaaactgtgaacatctgatcttgatactggcttatgttgtctcttgttaagcttttgcttctttgcattattcatgaccattcaattaatttttgtatagccatacaggtaggattattaccaagtgcctaccgtgtaccaggaatagttctaagccttgagaatacagcactaataaggcagactccctgctcaaatagagccaactaatgaaaaatcgataaaatagagactaaagagagatccttagttgcgtttaaaatcttagtttttaacttccaggctggcacagtttgttaacaaaaaaaaaaaaaaggggcggccgttctaaagaaccaaagtttactaacgcgggcttgcaaggtaaaactttttttatggggcccccaaaatcaattccaggggccggggtttaacaagggtggaacgtggaaaaacanntttntttttgcgctttcgctcggtgagaactgatgatttctcggaatggatgacggcgcggatcgcttaccggaatgcacggttggtattgatcgatagatcgtcgggaacatttactagatggattggcggatactatgcgatagaccgatggtagcggtctgccgacgtgtccgtcgggtgatatcgtcgttcggtttggtgtgtctgattgttgggatcggtgccagctaacgaacgggttgacgaaagagaggacagcattgtctggtctcgatcgtctaaccgtcgttctggagggaaacgaccggattatagacaggcttcgtcagcgcgggagcgcatggtggcttagggaacaggggacgcgtgagagaggacgcgtgggtgcacatacatgtttaatatggcaatgaattatccgatctctattagatggcacacgcgggtcgattgtaagcggacttggctggacgctcgtgatttaatcgccatgtgcggagtagttcggcgataattattgtattcatcacgatgagatgtgacggcagaggcg

SEQ ID NO: 610 - DNA, 1192 bp, Homo sapiens
cccacgcgtccgccttgccttcctgacccaggggctccgctggctgcggtcgcctgggagctgccgccagggccaggaggggagcggcacctggaagatgcgcccattggctggtggcctgctcaaggtggtgttcgtggtcttcgcctccttgtgtgcctggtattcggggtacctgctcgcagagctcattccagatgcacccctgtccagtgctgcctatagcatccgcagcatcggggagaggcctgtcctcaaagctccagtccccaaaaggcaaaaatgtgaccactggactccctgcccatctgacacctatgcctacaggttactcagcggaggtggcagaagcaagtacgccaaaatctgctttgaggataacctacttatgggagaacagctgggaaatgttgccagaggaataaacattgccattgtcaactatgtaactgggaatgtgacagcaacacgatgttttgatatgtatgaaggcgataactctggaccgatgacaaagtttattcagagtgctgctccaaaatccctgctcttcatggtgacctatgacgacggaagcacaagactgaataacgatgccaagaatgccatagaagcacttggaagtaaagaaatcaggaacatgaaattcaggtctagctgggtatttattgcagcaaaaggcttggaactcccttccgaaattcagagagaaaagatcaaccactctgatgctaagaacaacagatattctggctggcctgcagagatccagatagaaggctgcatacccaaagaacgaagctgacactgcagggtcctgagtaaatgtgttctgtataaacaaatgcagctggaatcgctcaagaatcttatttttctaaatccaacagcccatatttgatgagtattttgggtttgttgtaaaccaatgaacatttgctagttgtatcaaatcttggtacgcagtatttttataccagtattttatgtagtgaagatgtcaattagcaggaaactaaaatgaatggaaattcttaaagggaatgatgtgattcaagctggaaagagggttgggagaaacagcttgtccaggtggagctatgttatgatcagatcgaagtgtgacccctgtgtggtccagacagccctgcagagagaaaacctttattcgattatcaccaagcacctcctg

SEQ ID NO: 611 - DNA, 1897 bp, Homo sapiens
cggcatctgcgtgctggggaccgacagtgtgggtgtgttaggaggatctgtatttagcacatttttgcctctggctaggacagggtggaaagggtggcgtggctacagcctgacccatgggcaccgtcctaccctttgttctgtgcttccgagtgtcatacatgtgctggggtctgtgggcccatgactcagacggtgagctctgaccttcctgagccagggctttgctgtagttgtgcctggctcaagagctctaggacaaggggaccgctccaggtctgcatctacggtgtggcagggcccttcggcactcttgtgcactagtgtcatctttcccattgaaatgactgtgaggaccagaatgtgcacatgcagatgggcagctacttgtctgccttggccctttattacacaacttgctgggggtggagatgccaccccccggcagtcagagcccctttatgatgtcatggggctggttacatgactgccaaggggtgctgctggccacactgcactagcaagtttgccagatggaggacaagcgatcattgagtatggctcgctgtgaagaaagaaattcgagaggacaggatcatggcttggaaagggtgcctttccctccccagttgcagtcagagacctaccttcacccagcagatccttcccctgcctgggacgacccggggtccactgggagccctaacttgaggctgctgacagaagaaatcgctttccaacctctggccgaggaagcttcgttcagaaggccgcaccctgacggtgacgtcccgccccagggagaagataatctcctctccctcccctttccacagaaactgtggagactggtcagcagcaaccagttttcgtccatctggtgggatgacagtggggcttgtagagtgatcaatcaaaaactctttgaaaaggagattctcaaaagggacgtcgcacacaaagtgtttgccacaacttcgataaagagcttcttccgccagctaaacttgtatggcttccgaaaacggcgtcaatgcactttcaggaccttcacccgcattttctccgcaaaaaggctggtctccatcttgaataagttagagttctactgccatccttactttcaaagagactcccctcacctcctcgtgaggatgaagagaagagtgggtgtcaagtctgcaccaagacatcaggaggaggacaagccagaagctgctggatcctgtctggcaccagcagacactgagcaacaagatcacacgtctccgaatgagaatgaccaggtcacaccgcaacaccgggaaccggccggtcccaacacccaaatcaggagtggctctgctccaccagcaactcctgtgatggtgcctgattccgccgtggcgagtgacaacagtccagtgacccagccggccggcgagtggtcagagggcagccaggctcacgtcactccggtggccgctgtccctgggcctgcagcgctgcccttcctctatgtccctggatctcccactcagatgaattcttacgggcctgtggtggcccttcccacagcgtcccgtagtacccttgccatggacaccacaggacttcctgcacctggcatgctgcccttttgccatctctgggtaccggtgaccctagtggctgctggggctgcacagcctgctgcctccatggtcatgttcccccatctcccagctctgcaccaccattgcccccacagccaccgcacgtcacagtacatgccagctagcgatgggccccaggcgtacccagactacgcagaccagagcacatagagggcagcatttgggcagaatatgtgctggtcaataaatgtgtcagaaaatgagtaattttctgactgcacaaaaagtcttcatggtctcca

SEQ ID NO: 612 - DNA, 594 bp, Homo sapiens
atgtctcaatattcctcgtcctagaactctcagaggatccagaactacagccggtcctcgctgggctgttcctgtccatgtgcctggtcatggtgctggggaacctgctcatcatcctggccgtcagccctgactcccacctccacacccccatgtacttcttcctctccaacctgtccttgcctgacatggtttcacctccaccatggtccccaagatgattgtggacatccaatctcacagcagtcatctcctatgcgggctgcctgactcagatgtctctttttgccatttttggaggcatggaagaaagacatgctcctgagtgtgatggccctatgaccggtttgtagccatctgtcaccctctatattattcagccatcatgaacccatgtttctgtggctttctagttctgttgtcttgttgtctcagtcttttagactcccagctgcacaatttgattgccttgcaaattacctgcttcaaggatgtggaaattcctaatttcttctgtgacccttctcaactcccccaccatgcgtgttgtgacaccttcaccaataacatagtcatgtatttccctgctgcaaa

SEQ ID NO: 613 - DNA, 2898 bp, Homo sapiens; identical to SEQ ID NO: 141

SEQ ID NO: 614 - DNA, 440 bp, Homo sapiens
tactactcagaagaaatcagagttaatattttagtgtaaattttttatctatgaagtaaacaattttaaaagctaaatatagagtctcatttagaaaatatgtattataccttgtgtaattttgtattctttacacttcacatgatattgtttcccaagtcattaaatattcttctaagtaaccagattagatcagcaatagttcacttaaaacagcgaacaagctgcattaaaaaccagccagagccttaccaaagagctgatgctatgaataccaatcatagcttagttgctgttccatatgttaatttaatttgacagagtaagagtctttgaagtcctaattctcttttgcatccaataaaccagtttttatagtgcgtgaacttttagacatcagcctgcagctaaactcatgtcgggaagttgccatgaggtca

SEQ ID NO: 615 - DNA, 1327 bp, Homo sapiens
  misc_feature (1)...(1327): n = a,t,c or g
aacagtcgacgatatcgttctgtgtgtcagccttcctggaaggcacttaaatgagttcacagaaggcaaagtgaaggacatacgtaggtgactcgagtgtccaccatcgacctgttctgcaacccagctgtcaaaatcctgccccaagctctttgacataagggtacttctggtagaatttttttaaaacttaattacttcctgcaggcttcagaatgtttgagcatgaaaacaaatggaagcaggcttactttcgatgtcttattaaggtctttaccatgatcaatgttacctttatgacaagcttcatatgccttgttaggcagaatgttttggatggtaaaaatcctgactcccaaagcatcaacattccaagtaactacttcagtttcagttccgctcaccagtgctacaggagcagcgtgcagcgggtcctgcttccattcgactggctgtgcaggacggccacaaacacacgcaggtgcaccctgcgcttctgagcagaactctcggaatgaagtaatgcagacgtccacaaatgagatgtgatttcactgagggaggctgatttttagcagttgttccttttttaacagatagtctataagtggaaactgacctgaaacattcagctctaaagaaataatcacaaagcacctcggtgcctgatttttgcaaggcagtccttgccggaggatcgggcattcgtgcacattcacccggagaccgtgctgtccacttccagaaggggaggaagggcagcgctcagaagcacgcccagactgtctccagccctgctgccccctgctgaggccatctcgcctgctcagcccccaagttcccccacagtccatgtccctgggttatgaatgtcacctggtgtctgtcagatccccaccccattgttcttgtcaatgagcaggagtggggtggacctgccatcctgcgaatcctttacagcctgcaagcgctgcctgccaactcttcacaaccattagcacccactaacaatccatttcccctggagctcttcactctaaagatagaagaccaaaaaatagaagtgtcctcatttctcacagtactacaggaggaggtgagaaccgattgcatccgtgcatcttaggagaatctcatttcagacctcggctttgagtgcgcctcctgctcagtcagcccttttccctcgctggcaggttgacgtgggtcaggacagtgcgcagttcaggcagccttgattttcggttctggggtttggtccaaggattgaccgggttccnttttgttcattgccccttcntgttgcaacccctgggtttgttttggc

SEQ ID NO: 616 - DNA, 609 bp, Homo sapiens
tccacccgaggggtcctgagccctatcctggtttgttgccggacccccaagagcattccaagcaaatcaacactgacacattcatgatctaatgctcagattcattcagctttctctgactctccgctgatgcccttcatgcctaagcatgctcccggtccatgcactgcagacagttaaaggaagtgctgcagcttcctttaacctgcagcagctgctgtgtctgtaccatgaccgtggcatttcccagcgtccagcaggtgtggatggagactgtgctgactctgggtgggcttgatgctgctcaggatgagatccaggcggtgaggctcattctcctccctgagtcctctcctcaggggccacatgggaacctggctccctgttctgcaaagcccttcttccttccccaagtcatgcccttgggcacagccccttagggctaggggccttcaccctcaggcaggctgacccacccctgcaggccaggatggctgagtccctgctggggtggagcacgcctggccctgcctctacgaaccggagcacagtttagaccttcgcccgaagaggacagcagttaccccggcccaaaccaaaggacgcccc

SEQ ID NO: 617 - DNA, 839 bp, Homo sapiens
ctgctgctctggcccctggtcctgtcctgttctccagcatggtgtgtctgaggctccctggaggctcctgcatggcagttctgacagtgacactgatggtgctgagctccccactggctttggctggggacaccagaccacgtttcttggagtactctacgtctgagtgtcatttcttcaatgggacggagcgggtgcggttcctggacagatacttctataaccaagaggagtacgtgcgcttcgacagcgacgtgggggagttccgggcggtgacggagctggggcggcctgatgaggagtactggaacagccagaaggacttcctggaagacaggcgggccgcggtggacacctactgcagacacaactacggggttgtggagagcttcacagtgcagcggcgagtccatcctaaggtgactgtgtatccttcaaagacccagcccctgcagcaccacaacctcctggtctgttctgtgagtggtttctatccaggcagcattgaagtcaggtggttccggaatggccaggaagagaagactggggtggtgtccacaggcctgatccacaatggagactggaccttccagaccctggtgatgctggaaacagttcctcggagtggagaggtttacacctgccaagtggagcacccaagcgtgacaagccctctcacagtggaatggagagcacggtctgaatctgcacagagcaagatgctgagtggagtcgggggctttgtgctgggcctgctcttccttggggccgggctgttcatctacttcaggaatcagaaaggacactctggacttcagccaagaggattcctgagctga

SEQ ID NO: 618 - DNA, 1648 bp, Homo sapiens
ggtcgacccacgcgtccgatttgaagaagtgttttcatctatccaagaaaaatatgatgtctccatcccaagcctcactcttattcttaaatgtatgtatttttatttgtggagaagttgtacaaggtaactgtgtacatcattctacggactcttcagtagttaacattgtagaagatggatctaatgcaaaagatgaaagtaaaagtaatgatactgtttgtaaggaagactgtgaggaatcatgtgatgttaaaactaaaattacacgagaagaaaaacatttcatgtgtagaaatttgcaaaattctattgtttcctacacaagaagtaccaaaaaactactaaggaatatgatggatgagcaacaagcttccttggattatttatctaatcaggttaacgagctcatgaatagagttctccttttgactacagaagtttttagaaaacagctggatccttttcctcacagacctgttcagtcacatggtttagattgcactgatattaaggataccattggctctgtcaccaaaacaccgagtggtttatacataattcacccagaaggatctagctacccatttgaggtaatgtgtgacatggattacagaggaggtggatggactgtgatacagaaaagaattgatgggataattgatttccagaggttgtggtgtgattatctggatggatttggagatcttctaggtgatgcattccggggtctcaaaaaagaagataatcaaaatgcaatgccttttagcacatcagatgttgataatgatgggtgtcgccctgcatgcctggtcaatggtcagtctgtgaagagctgcagtcacctccataacaagaccggctggtggtttaacgagtgtggtctagcaaatctaaatggcattcatcacttctctggaaaattgcttgcaactggaattcaatggggcacgtggaccaaaaacaactcacctgtcaagattaaatctgtttcaatgaaaattagaagaatgtacaatccatattttaaataatctcatttaacattgtaatgcaagttctacaatgataatatattaaagatttttaaaagtttatcttttcacttagtgtttcaaacatattaggcaaaatttaactgtagatggcatttagatgttatgagtttaattagaaaacttcaattttgtagtattctataaaagaaaacatggcttattgtatgtttttacttctgactatattaacaatatacaatgaaatttgtttcaagtgaactacaacttgtcttcctaaaatttatagtgattttaaaggattttgccttttctttgaagcatttttaaaccataatatgttgtaaggaaaattgaagggaatattttacttatttttatactttatatgattatataatctacagataatttctactgaagacagttacaataaataactttatgcagattaatatataagctacacatgatgtaaaaaccttactatttctaggtgatgccataccattttaaaagtagtaagagtttgctgcccaaatagtttttcttgttttcatatctaatcatggttaactattttgttattgtttgtaataaatatatgtacttttatatcctgaaaaaaaaaa

SEQ ID NO: 619 - DNA, 739 bp, Homo sapiens
agcgtggtggaattcctcagccaagatgaagcatgccttttcaaaaagaacaccccaaaataagtattttaccattatctaaaagactacttttgctgggttttattttttaatctattgaacatgagaacatggtcaaaagtcataccttccttatggttgaaattttctagaggttttataatattgagatttcattttttaatgataatttggcctgacataccttccagtatgtacatttgtatgagttttatcacagcatttaaaaatctctttatgtttggaattaataggattaaaaaaatctcagtagtttctagaaatactttatagtgacagttttgttttttagtcttccagattgttgatattaatgcaaacaatattaagcttatatcacaaaaatattttcagtaaagcgtattttttataaactgtgttaggcactgggaataatacaaaaatgataaataaagcctgtcccttgcctgatgtcacagtcgggctacagctgccagaaacaaggccagcaaaattaggatacagcttgcgaatgtagtgtgaagaaaggccttcggaataccaaagaaaattctagggtcagggaaagctttgaagagaaggtgatgtttcagctatgtttgaagaatggggagggctcatcagcgatagaacatttctagataggcttggaagcatgagagcatggagcaattgggaacacccaatatgcccg

SEQ ID NO: 620 - DNA, 1066 bp, Homo sapiens
cggacgcgtgggaaaaaaagaaagtagtccttgaatcctttctgctacaaagtctgccctctggcttcttattctaaggccaaacaggaggagtaactgattccacccgagagagattcagagttgcttggtttcttggctgttggctgttgtggtggatgggcctgtgtgtgccttttgctgtgactacctctttcctgtccttaggcttagagtgggacctgaatgtgcggctgcatggccagcatttggtccagcagctggtcctaagaacagtgaggggctacttagagacgccccagccagaaaaggcccttgctctgtcgttccacggctggtctggcacaggcaagaacttcgtggcacggatgctggtggagaacctgtatcgggacgggctgatgagtgactgtgtcaggatgttcatcgccacgttccactttcctcaccccaaatatgtggacctgtacaaggagcagctgatgagccagatccgggagacgcagcagctctgccaccagaccctgttcatcttcgatgaagcggagaagctgcacccagggctgctggaggtccttgggccacacttagaacgccgggcccctgagggccacagggctgagtctccatggactatctttctgtttctcagtaatctcaggggcgatataatcaatgaggtggtcctaaagttgctcaaggctggatggtcccgggaagaaattacgatggaacacctggagccccacctccaggcggagattgtggagaccatagacaatggctttggccacagccgtcttgtgaaggaaaacctgattgactacttcatccccttcctgcctttggagtaccgtcacgtgaggctgtgtgcacgggatgccttcctgagccaggagctcctgtataaagaagagacactggatgaaatagcccagatgatggtgtatgtccccaaggaggaacaactcttttcttcccagggctgcaagtctatttcccagaggattaactacttcctgtcatgaaggctagaggaagacttcctggaactgcctttcttcca

SEQ ID NO: 621 - DNA, 436 bp, Homo sapiens
ggaaattaaaagatttaattgttaaatgtaagttgggaaattaaaagtctgtgtaattagtcctgtttttgccacctgtgataaaataataaggcttctatttatctaagaagacccgggcatacacaacagtggtttttaaaaatttaccgtcaacttgaagtattttcctttctcttccatgaagagcagtaacattttttctcttttcttatttttagtaacttttatcttcctgacttccatagccagcatcttattttcttcttggtgtcctttttcccttatcaaatgtaaccaggatctttattatagtggaaatggggccagttgatgaagtctaatatgaaacgaatattttaactttcaaatgcagaagagctaagttgcaaagatagcagaactgtccaatctgtctaccttcacagcagtgctg

SEQ ID NO: 622 - DNA, 787 bp, Homo sapiens
  misc_feature (1)...(787): n = a,t,c or g
gaatcttgttaagggttggctgggatacatttatatgctttgcagtctcttccatatattaatagttacattattgctggccatctcatttgggatgtcttctaggaatactctgaatatggtcaattcaaagattaaagagcattcactccatagaaaacttgaaatatgaaatcttatagctcagatatgaaggaaacttagcagtttccccagatttgacaattctaaaaattacatggtgctactaatacatagttgaggatgtaaaagaagcctctataaactgccaaaaagaaaaataaaaagggattttccattaaaaatgtatgtgctatgtaattttaaatgagatcatgccattatatagattttttttttttggacggagttttgctcctgttgcccaggctggagtgtaatggggccatctcggcttgctgcaacctccacctcctgggttcaagcgattctccagcctcagcctcccaagtggctgagattgcaggcaccgccaccacccccgcaaaattttggaattttaagaagatagggggttcaacattttggcccggctgggcttaaacttctgatccacccacttaacctnccaaaggggctgaattacagggtgagccaccgccctgccagtatatgaatttaaaagggtggtttgaggcacactacattttcctagaactactccgatatattttacggggaacctaaattttacccttgtaaataaaaaaaaaatattttattccaaaaaaggatggccctcccc

SEQ ID NO: 623 - DNA, 417 bp, Homo sapiens
ggattatgttttggaccctggttcaggggatgtccttactgtgtctaactgatgtgtttcaggctcttccttcaatatgtattgcgaatagtgagatttattacacagtcctaacattgatgcagtttaattgcttgtggatggtgttgtcaggaaaaaaggtaatattttcttctgaactcatggttagaaagggcaggagaagctggaagtaagatatcctccatcctccttagacatatttacatcacctcttccaggtttgcatattgcttacaatcaatacagagaagagaaaacaaaggaaatatgtgataagttgataaattactgctacaaaatttaaattctggccctaaagcaataacaaagtagaacatagtgaaacaagtacacaaaagatttaaaactggggat

SEQ ID NO: 624 - DNA, 612 bp, Homo sapiens
ttagacctaaggtgatatgagaatataatgtatgtccatcaagaaaaggatatatttgttgagtaaactttaaaattaggaaggggatcatctatgatacattaacatatatctgatgatacattagctgatgatatatgctatgatatattagcatattctaattagcatatatcatcagcatatatgggaatgtcattggcatgtatttgaagcccttaatatacttttctattttgatatttttgagtcaaaggagtaaattatcccttccctacaatgttcacaattgtatgaatataggtgaagataggcgaccccagaaagtacagctgcttcagttgtactaataagtaatcatcatcctgcaagaagtatgttgtgacttctcctacaattaactatcatatagtttaatatatgtttaatattattataaaaagtagaaaaataaaatttatttagaagcaaggattagattgcaataattattatatttataatttctagcatgtttggggagggaccatttaggttcctaaaccaatgggctgggttttttaaaaccaaaaccttccaccaaaagtttttagctttaaccttaaaaaaggc

SEQ ID NO: 625 - DNA, 434 bp, Homo sapiens
gtctcgattccgcacgcccacgctccgttctcttatttcaaaattacatattcttatacactatggaacttggaaaataagggaaagcataaagaaaatttaaatcacccataatttcacaaaccagagatgaaaccactgctaacagttgctgtaatttcttccagtctcttttctacagtgagatctgtatttctagctggctacacatagtataaatctaggtttagaatcaagtagaaatagctctagagtgctgccgatgctgccattggctctgatagtggatctcatttatccctgggtccaggtgagaggtcctgaggacccaaatcatgggacaacagagagaaaaagagaagaggtgacctgcctaggggcggcccggctgagtttggaagccgcaaggtgaactccctccatgggagaaagct

SEQ ID NO: 626 - DNA, 1026 bp, Homo sapiens
gaaactgcaagagtggggcagagaaccagagtgtcagagcaaaacctcctctatctgcacatcctggggacgaaccgggcagccggagagctgcggccggcccagtcccgctccgcctttgaagggtaaaacccaaggcggggccttggttctggcagaagggacgctatgaccgcagaattcctctccctgctttgcctcgggctgtgtctgggctacgaagatgagaaaaagaatgagaaaccgcccaagccctccctccacgcctggcccagctcggtggttgaagccgagagcaatgtgaccctgaagtgtcaggctcattcccagaatgtgacatttgtgctgcgcaaggtgaacgactctgggtacaagcaggaacagagctcggcagaaaacgaagctgaattccccttcacggacctgaagcctaaggatgctgggaggtacttttgtgcctacaagacaacagcctcccatgagtggtcagaaagcagtgaacacttgcagctggtggtcacagataaacacgatgaacttgaagctccctcaatgaaaacagacaccagaaccatctttgtcgccatcttcagctgcatctccatccttctcctcttcctctcagtcttcatcatctacagatgcagccagcacagttcatcatctgaggaatccaccaagagaaccagccattccaaacttccggagcaggaggctgccgaggcagatttatccaatatggaaagggtatctctctcgacggcagacccccaaggagtgacctatgctgagctaagcaccagcgccctgtctgaggcagcttcagacaccacccaggagcccccaggatctcatgaatatgcggcactgaaagtgtagcaagaagacagccctggccactaaaagaggggggatcgtgctggccaaggttatcggaaatctggagatgcagatactgtgtttccttgctcttcgtccatatcaataaaattaagtttctcgtcttaaaaagaaaaaaaaaaaaaa

SEQ ID NO: 627 - DNA, 1821 bp, Homo sapiens
tttcgtgaggaagttcaagggcgagagtgagtaccagcagaaggctgggagtctgtagtttgttcctgctgccaggctccactgaggggaacggggacctgtctgaagagaagatgcccctgctgacactctacctgctcctcttctggctctcaggctactccattgccactcaaatcaccggtccaacaacagtgaatggcttggagcggggctccttgaccgtgcagtgtgtttacagatcaggctgggagacctacttgaagtggtggtgtcgaggagctatttggcgtgactgcaagatccttgttaaaaccagtgggtcagagcaggaggtgaagagggaccgggtgtccatcaaggacaatcagaaaaaccgcacgttcactgtgaccatggaggatctcatgaaaactgatgctgacacttactggtgtggaattgagaaaactggaaatgaccttggggtcacagttcaagtgaccattgacccagcgtcgactcctgcccccaccacgcctacctccactacgtttacagcaccagtcacccaagaagaaactagcagctccccaactctgaccggccaccacttggacaacaggcacaagctcctgaagctcagtgtcctcctgcccctcatcttcaccatattgctgctgcttttggtggccgcctcactcttggcttggaggatgatgaagtaccagcagaaagcagccgggatgtccccagagcaggtactgcagcccctggagggcgacctctgctatgcagacctgaccctgcagctggccggaacctccccgcaaaaggctaccacgaagctttcctctgcccaggttgaccaggtggaagtggaatatgtcaccatggcttccttgccgaaggaggacatttcctatgcatctctgaccttgggtgctgaggatcaggaaccgacctactgcaacatgggccacctcagtagccacctccccggcaggggccctgaggagcccacggaatacagcaccatcagcaggccttagcctgcactccaggctccttcttggaccccaggctgtgagcacactcctgcctcatcgaccgtctgccccctgctcccctcatcaggaccaacccggggactggtgcctctgcctgatcagccagcattgcccctagctctgggttgggcttggggccaagtctcagggggcttctaggagttggggttttctaaacgtcccctcctctcctacatagttgaggagggggctagggatatgctctggggctttcatgggaatgatgaagatgataatgagaaaaatgttatcattattatcatgaagtaccattatcataatacaatgaacctttatttattgcctaccacatgttatgggctgaataatggcccccaaagatatctgtgtcctaatcctcagaacttgtgactgttaccttctgtggcagaaagggacagtgcagatgtatgtaagttaaggactttgagatagagaggttattcttgctgattcaggtgggcccaaaatatcaccacaagggtcctcataagaaagaggccagaaggtcaaagaggtagagacaaagtgatgatggaagtggacgtgggtgtgacgtgagcaggggccatgaatgccgcagccttcagatgccagaaagggaaaggaatggattcccctgcctggagcctccaaaagaaaccagccctgcccacgccttgacttgagcccattgaaactgatcttgagctcctggcctccagaattgcaggagaataaatttgtgttgtttttaatgagaaaaaaaaaa

SEQ ID NO: 628 - DNA, 821 bp, Homo sapiens
cctgctcgacgggaggcaggaggggagtctcactaaaccttccttggctggagtcagccaaacatgaggattagttgcccttggtgcttgtggaatctctccttggaagtgggaggcactgtggcgaccactgcccagcagcacatagcagaggtgtgcagaagcagccaggcagggagaggttttctccactgtttgcacccagcactgggcacttctggatgccaccctgttccttgcagcagctccctggtgggctttggatggaggggctactcaggagaagccagctgggggagggccagcagccggccagcagcccccactcctcccatgccagccaacgtacaggccggatgggaacagtctgtgaggcttttgtgccactcctggctgcgcttggcagctctgcatgtcacacatgaggaatcctgagtctcaaaatggcccaggaatccagcatgagctgtgctaggagtcaagaggtttgccacgactgggcttggttccttgttcatgagcgagcacgtccctcagtctatccatctagctggtgacgtttcctgaacaccaggggagaccaggctctgttctaggcacgggcagcagtgaggaagactgcacggcccctgaagctagtgctgggggacagggttggggtggcatggccctcatcaccagccgcctgcgagtctgtgccagagcagattggggtgacaacagactgcactgtgtggggtgaggggcagcatgtggctggcccccaaatgaggggagatatggttagggaggcaccttggcctgttggcaatgggtgggaa

SEQ ID NO: 629 - DNA, 877 bp, Homo sapiens
  misc_feature (1)...(877): n = a,t,c or g
agtgcccctgatcacccaagttggccagtgaccctggtgtggggctgattctgtctggatatacggggaggggtaagcatgaggaaaggaagcaggtcctgacaggtactttgcactaaacagctccttataaggttctcaatttgcctgctcaatttctacagacatttgtgggaccacaccagtacattgtaaaagcaggaaacaattgagaaaaacctgagttttatgttggtaggagaaatgcctatggaatatggcaaatcgtttctctgagacttcctccctagtaattacatatttgttctcaaaaacaaatgccagaaggaagaagcagatttaatagtgcattttacaaggcaccattaatctctaagaagaacaattaaaatgtctcagcaatcatggttcactgtatatcttttctatcttcttagaagtaatatatggctggaaatgggcataccaaaatatgtcaaggaagtggaattgcgttcattagatttcaccagtaattattttagttagcttcacagatctctcttccttgcttgttcttgagagcgaggctttttagtaggaagagaaattgtctaaaacgattaataaccacaaattcaccaaactattttgggtaagtccctctatttctctaggtctaaagctaggaataagagtcattctcatataatgtactgtcccagaaagggcattannnnnnnnnnnnnnnnnnnnnnnnnnnnnnnnnnnnnnnnnnnnnnnnnnnnnnnnnnnnnnnnnnnnnnnnnnnnnnnnnnnnnnnnnnnnnnnnnnnnnnnnnnnnnnnnnnnnnnnnnnnnnnnnaggcacatcttacatggtggcagacaagacagaa

SEQ ID NO: 630 - DNA, 3229 bp, Homo sapiens
cacattcctcctctgaagaagcccctgggagcacagctcatcaccatggactggacctggaggttcctctttgtggtggcagcagctacaggtgtccagtcccaggtacaactggtgcagtctggggctgaggtgaagaagcctgggtcctcggtgaaggtctcctgcaaggcttctggaggcaccttcagcacctatgctatcagctgggtgcgacaggcccctggacaagggcttgagtggatgggagggatcatccctatctttggtacagcaaactacgcacagaagttccagggcagagtcacgattaccgcggacgaatccacgagcacagcctacatggaactgagcagcctgagatctgaggacacggccgtgtattactgtgcgagagtttggggtggttcggggagttattattccatagtgtctacgattggagccactactacggtatggatgtctggggccagggaaccctggtcaccgtctcctcagcctccaccaagggcccatcggtcttccccctggcaccctcctccaagagcacctctgggggcacagcggccctgggctgcctggtcaaggactacttccccgaaccggtgacggtgtcgtggaactcaggcgccctgaccagcggcgtgcacaccttcccggctgtcctacagtcctcaggactctactccctcagcagcgtggtgaccgtgccctccagcaacttgggcacccagacctacatctgcaacgtgaatcacaagcccagcaacaccaaggtggacaagaaagttgagcccaaatcttgtgacaaaactcacacatgcccaccgtgcccagcacctgaactcctggggggaccgtcagtcttcctcttccccccaaaacccaaggacaccctcatgatctcccggacccctgaggtcacatgcgtggtggtggacgtgagccacgaagaccccgaggtcaagttcaactggtacgtggacggcgtggaggtgcataatgccaagacaaagccgcgggaggagcagttcaacagcacgtaccgtgtggtcagcgtcctcaccgttgtgcaccaggactggctgaacggcaaggagtacaagtgcaaggtctccaacaaagccctcccagcccccatcgagaaaaccatctccaaaaccaaagggcagccccgagaaccacaggtgtacaccctgcccccatcccgggaggagatgaccaagaaccaggtcagcctgacctgcctggtcaaaggcttctatcccagcgacatcgccgtggagtgggagagcaatgggcagccggagaacaactacaagaccacgcctcccgtgctggactccgacggctccttcttcctctatagcaagctcaccgtggacaagagcaggtggcagcaggggaacgtcttctcatgctccgtgatgcatgaggctctgcacaaccactacacgcagaagagcctctccctgtccccgggtaaatgagtgcgacggccggcaagcccccgctccccgggctctcgcggtcgcacgaggatgcttggcacgtaccccgtctacatacttcccaggcacccagcatggaaataaagcacccaccactgccctgggaagtatgtacagggggtacgtgccaagcatcctcgtgcgaccgcgagagcccgggggagcggggggctttgcgtgccggtcgcactcatttaacccgggaacaggaaaaggctcttttgcgtgtagtgggttgtgcagagcgctcatgcatcaccggagcatgagaaagacgttccccttgctgccaccctgctctttgtccaacggggagctttgttatagaggaagaagggagccgtccggagtccacccacgggaaggcggggtctttggaattggttctccggttgcccattggctctcccactcccacgggcgaatgtcgctgggataagaaggcttttgaccaggcaaggtcagggctgaccatggtttcttggtacatctccctcccgggaatggggcgcagcggtgtaccaccttgtggttcttcggggcttgcccttttggcttttggaaaaaggttttcctaaaaagggggcctgggaggggctttggttggagacccttgcaacttgtaactcccttgcccattcaacccaatcctgggtgccaggaacggtgaggaacgctgaaccacacgggtaccggcctgtttgtactgactcttcccgcggctttgtcttggcacttatgtacctccaaggccgttccacgtaccaagttggaacttgtacctcaggggtcttccgtgggtccacgtccaccaccacgcatgtagacccctaggggtcccggaggatcatgagggtgtccttggttttggggggaaaaaagaaaactccccggtccccccaggaagtcaaggtgttgggcacggtgggcatgtgcgagttttgtcacaagatttgggctcaactctcttgtccaccttggtgttgctgggcttgtgattcacgttgcagatgtaggtctgggtgcccaagctgctggagggcacggtcaccacgctgctgagggagtagagtcctgaggactgtaggacagccgggaaggtgtgcacgccgctggtcagggcgcctgagttccacgacaccgtcaccggttcggggaagtagtccttgaccaggcagcccagggccgctgtgcccccagaggtgctcttggaggagggtgccagggggaagaccgatgggcccttggtggaggctgaggagacggtgacatgggttccctggccccagtagtccacaagcgggctaccaggcgctgccaaacccctcaaggtcgcacagtaataaacggccgtgtcttcatatctcaggccgctcagctccatgtagactgtgctcgtggatttgtccgcggtaatcgtgactctgccctgaaattgctgtgcgtagtttccaacaccgaggatagggataatccttcccatccactcaagtccttgtccaggggcctgtcgcacccagctgacagcatagctgctgaaggtgcctccagaagccttgcaggagaccttcaccgaggacccaggctccttcacctcagccccagactgcaccagctggacctgggactggacacctgttgctgctgccaccacaaagaggaacctccaggtccagtccatggtgatgagctgtgctcccaggggcttctttaga

SEQ ID NO: 631 - DNA, 3229 bp, Homo sapiens; identical to SEQ ID NO: 630

SEQ ID NO: 632 - DNA, 1520 bp, Homo sapiens
atggaggagcttttaggaactgtatttgtgatctggtggctttggcctggcagctacggcaccagtgcagctgatactcaaggttcagatcagaagaggaggcttctcaccctgcagcagggacctgtgagcatggcatgccctggcttcctgtgggcacttgtgatctccacctgtcttgaatttagcatggctcagacagtcactcagtctcaaccagagatgtctgtgcaggaggcagagaccgtgaccctgagctgcacatatgacaccagtgagagtgattattatttattctggtacaagcagcctcccagcaggcagatgattctcgttattcgccaagaagcttataagcaacagaatgcaacagagaatcgtttctctgtgaacttccagaaagcagccaaatccttcagtctcaagatctcagactcacagctgggggatgccgcgatgtatttctgtgcttataggagcggaagagatgacaagatcatctttggaaaagggacacgacttcatattctccccaatatccagaaccctgaccctgccgtgtaccagctgagagactctaaatccagtgacaagtctgtctgcctattcaccgattttgattctcaaacaaatgtgtcacaaagtaaggattctgatgtgtatatcacagacaaaactgtgctagacatgaggtctatggacttcaagagcaacagtgctgtggcctggagcaacaaatctgactttgcatgtgcaaacgccttcaacaacagcattattccagaagacaccttcttccccagcccagaaagttcctgtgatgtcaagctggtcgagaaaagctttgaaacagatacgaacctaaactttcaaaacctgtcagtgattgggttccgaatcctcctcctgaaagtggccgggtttaatctgctcatgacgctgcggctgtggtccagctgagatctgcaagattgtaagacagcctgtgctccctcgctccttcctctgcattgcccctcttctccctctccaaacagagggaactctcctacccccaaggaggtgaaagctgctaccacctctgtgcccccccggcaatgccaccaactggatcctacccgaatttatgattaagattgctgaagagctgccaaacactgctgccaccccctctgttcccttattgctgcttgtcactgcctgacattcacggcagaggcaaggctgctgcagcctcccctggctgtgcacattccctcctgctccccagagactgcctccgccatcccacagatgatggatcttcagtgggttctcttgggctctaggtcctggagaatgttgtgaggggtttatttttttttaatagtgttcataaagaaatacatagtattcttcttctcaagacgtggggggaaattatctcattatcgaggccctgctatgctgtgtgtctgggcgtgttgtatgtcctgctgccgatgccttcattaaaatgatttggaagagcaaaaaaaaaa

SEQ ID NO: 633 - DNA, 668 bp, Homo sapiens
attcccgggtcgacgatttcgtatatatttctaatgattgggctttagctttaaaaacattaggctagatgcctccctattttttgtggcatgatttagctgtaactagcctggaggcaataacaatactaaatgaccttttgtagtcacattaaacattgaaatggtactgagactgccttggtggggagttttggcctatgggaatgatgtgggttttggtttctactcctttctctgttatcagataaatcctcctacatgtcccattctctggctctgggaagtactgacagtagggaaaagttagtacactcatctcattgttcagatcaagtttcctgggtgcggttttgcagaacttcctacaagagctgactcaagagttctcttctattgtggagatgatcctgctcttatatgtcatactaatttatatcctagaaactgtgagcagcatcatttgcatgtgttaagttgggaatgaataaagtgaaaatattttcacacattccttgagaaaagggttccttttgctgtgcaaatcaacgctccctagatgctgtggctaaaaagtgaagaattctaggccaacatttttttacccctttcatttcctttacttgcttgtttttagaaagcgtgcgaggtcctgggacccaaaggta

SEQ ID NO: 634 - DNA, 1833 bp, Homo sapiens
gaattcccgggtcgacgatttcgtcaggagggagaaggaggagccagcggaaggacggtgtgcgggccggccagccctggacgaaagaagagggcccctccaggccagtctgggcaccctgggatagcggctgcagccaggcatggccgactctgcacaggcccagaagctggtgtacctggtcacagggggctgtggcttcctgggagagcacgtggtgcgaatgctgctgcagcgggagccccggctcggggagctgcgggtctttgaccaacacctgggtccctggctggaggagctgaagacagggcctgtgagggtgactgccatccagggggacgtgacccaggcccatgaggtggcagcagctgtggccggagcccatgtggtcatccacacggctgggctggtagacgtgtttggcagggccagtcccaagaccatccatgaggtcaacgtgcagggtacccggaacgtgatcgaggcttgtgtgcagaccggaacacggttcctggtctacaccagcagcatggaagttgtggggcctaacaccaaaggtcaccccttctacaggggcaacgaagacaccccatacgaagcagtgcacaggcacccctatccttgcagcaaggccctggccgagtggctggtcctggaggccaacgggaggaaggtccgtggggggctgcccctggtgacgtgtgcccttcgtcccacgggcatctacggtgaaggccaccagatcatgagggacttctaccgccagggcctgcgcctgggaggttggctcttccgggccatcccggcctctgtggagcatggccgggtctatgtgggcaatgttgcctggatgcacgtgctggcagcccgggagctggagcagcgggcaaccctgatgggcggccaggtatacttctgctacgatggatcaccctacaggagctacgaggatttcaacatggagttcctgggcccctgcggactgcggctggtgggcgcccgcccattgctgccctactggctgctggtgttcctggctgccctcaatgccctgctgcagtggctgctgcggccactggtgctctacgcacccctgctgaacccctacacgctggccgtggccaacaccaccttcaccgtcagcaccgacaaggctcagcgccatttcggctatgagcccccgttctcgtgggaggatagccggacccgcaccattctctgggtacaggccgctacgggttcagcccagtgacggtggggctggggcctggaggcccagatacagcacatccacccaggtcccgagccctcacaccctggacgggaagggacagctgcattccagagcaggaggcagggctctggggccagaatggctgtccttgtcgtagagccctccacattttctttttcttttttgagacagggtcttgctctgtcacccagactggagtgcagtggtgtgatcatagctcactgcaccctcaacctcctgggttcaagcaatcctcctgcctcagcctcctgaacagctgggaccacaggtgcacgccaccacacctggcttttttttgttgtttttagagacagggtctcactatattgctcaggctggtcttgaactcctgggctcaagtgatcttcccacgtgggcctcccaaaacgctggaactacaagtgtgagccaccgcgccctggcccaagccctccacattttcaatccaggaagccttgagtctgtgttgtgtcctgacacctccaagttctaagggccgtcaggacaacggggagggtttggggacagagtgtccttcctctgtcctctcatcccag

SEQ ID NO: 635 - DNA, 1253 bp, Homo sapiens
ctgggttctggaggccctgggaccgcggaagaggcttcagacgctgcagcgatgcctcgcccacggcgggtcagtcagctcctggatctatgcctttggtgcttcatgaagaatatttccagatatctcacagacattaagcctttgcctcccaacataaaagacagactgattaaaataatgagtatgcagggacagataacagattcaaatataagtgagattttacatcctgaagtccaaactctagatctacggagctgcgatatatcagatgctgctctcctgcacctgtctaactgtagaaaactgaagaaattaaatttaaatgcttcaaaagggaaccgagtttctgtaacttcagaaggaataaaagctgtggcttcatcttgttcatacctacacgaagcttctttgaaaagatgctgcaatctcactgacgaaggagtcgttgctcttgcactcaattgccagctgctaaagatcatcgatttaggtggctgcttaagtattactgatgtgtccttacatgcattaggaaaaaactgcccatttttgcagtgtgtcgacttttcagctactcaggtatctgacagtggtgtgattgcacttgttagtggaccttgtgcgaagaaattagaggagattcatatgggacattgtgtaaatctgactgatggggctgtcgaagctgtccttacttactgtcctcaaatacgtatattactcttccatggatgccccttgataacagatcattcccgagaagtgttggagcaattagtaggcccaaacaaactaaagcaagtgacatggactgtttattgatgcttttttgaagatgatcaatgctaggaaagcttatcaaaactactttcccaggaaaccatctatagagatttgcattctacttaatgttaacactatttttaattattttattgtcttaagttataactctcagagaattagctaagtcttggtatatacatggtttgtgctttactcttaaacatctttaaagtgctattattctatatctgttggatgagtcattatttttgaaatgataatcctagcatgaactctgatctatggtgttggattctgtttcttaaataactttaaaattaactgttttcccttgagatttccttctcctatgtaggtatttgagctattgttctaagtttacctgtaagtataaaccttgggagaatctaagtaaacatatttctaaaagcatagttacc

SEQ ID NO: 636 - DNA, 1944 bp, Homo sapiens
atggattctatactgattcctccacttactaagaggttgaaaatgggcaagtcactttacctctctgtgccgcagtttcctgcttgtaacacctacagctgctccctgaacctcagagatgccaatgaggcggatacagggacgtacttctttcaggtggagagaggttattacatgaaatacagttacggaaatgagaagttgttcttgcatgtgacaaggcctcctctaagtcttgagcccgcagttcctgagagaagaaccctgaggaacagacgttccctcgcggccctggcacctctaaccccagacatgctgctgctgctgctgcccctgctctgggggagggagagggcggaaggacagacaagtaaactgctgacgatgcagagttccgtgacggtgcaggaaggcctgtgtgtccatgtgccctgctccttctcctacccctcgcatggctggatttaccctggcccagtagttcatggctactggttccgggaaggggccaatacagaccaggatgctccagtggccacaaacaacccagctcgggcagtgtgggaggagactcgggaccgattccacctccttggggacccacataccgagaattgcaccctgagcatcagagatgccagaagaagtgatgcggggagatacttctttcgtatggagaaaggaagtataaaatggaattataaacatcaccggctctctgtgaatgtgacagccttgacccacaggcccaacatcctcatcccaggcaccctggagtccggctgcccccagaatctgacctgctctgtgccctgggcctgtgagcaggggacaccccctatgatctcctggatagggacctccgtgtcccccctggacccctccaccacccgctcctcggtgctcaccctcatcccacagccccaggaccatggcaccagcctcacctgtcaggtgaccttccctggggccagcgtgaccacgaacaagaccgtccatctcaacgtgtcctacccgcctcagaacttgaccatgactgtcttccaaggagacggcacagtatccacagtcttgggaaatggctcatctctgtcactcccagagggccagtctctgcgcctggtctgtgcagttgatgcagttgacagcaatccccctgccaggctgagcctgagctggagaggcctgaccctgtgcccctcacagccctcaaacccgggggtgctggagctgccttgggtgcacctgagggatgaagatgaattcacctgcagagctcagaaccctctcggctctcagcaggtctacctgaacgtctccctgcagagcaaagccacatcaggagtgactcagggggcggtcgggggagctggagccacagccctggtcttcctgtccttctgcgtcatcttcgttgtagtgaggtcctgcaggaagaaatcggcaaggccagcagcgggcgtgggagatacgggcatagaggatgcaaacgctgtcaggggttcagcctctcaggggcccctgactgaaccttgggcagaagacagtcccccagaccagcctcccccagcttctgcccgctcctcagtgggggaaggagagctccagtatgcatccctcagcttccagatggtgaagccttgggactcgcggggacaggaggccactgacaccgagtactcggagatcaagatccacagatgagaaactgcagagactcaccctgattgagggatcacagcccctccaggcaagggagaagtcagaggctgattcttgtagaattaacagccctcaacgtgatgagctatgataacactatgaattatgtgcagagtgaaaagcacacaggctttagagtcaaagtatctcaaacctgaatccacactgtgccctcccttttatttttttaactaaaagacagacaaattcctaaaaaaaaaa

SEQ ID NO: 637 - DNA, 792 bp, Homo sapiens
  misc_feature (1)...(792): n = a,t,c or g
ctgatctagataatttatgtgtatacaaggttcattaaaaatagtttcttataatttttccctgatgacaaaagcnnnnnnnnnntttttcctgaattgatacattttcagattaatattatgaatctcacttataatttatgaaaaattctaaggtattaatatatacggaaagaacagtagtttgatttgaccaattttctaacatctgaaataaacacttcaaataaaatattagaataaaatatatgtactgccaaatggaaagttaattcattttcttaatctataatatatatagacagagatgaagaaaatgtgataattacaaaaaagatgatgaggaaacgcagtgactgtctgtaaaaccaactttttattcacaccttagcatcatgctgaagcccactgaatgtaaaggaaatacttttcccatgtgtatccatatttctcaagtaaactgaggagtccgtatattatcgacttcagtctgtgtacatctaaagggggctactcttggcttacaagtcaatttttaagatacctggggctttgccttctttaacagcccttttgctcagaatgttctatgctgtttgggcttgccttgcaattgatcctcgatttgaaactgacaactgtgaaccagcgagaaagtgatgtggcaagagttgccacggctgaagaatattcaaagaaaggtctgcttggacaggaaacacttcatgctggatcacagacaagaatgcagattcttatctcctgagaccccttgaattccaccgcaagtgg

SEQ ID NO: 638 - DNA, 796 bp, Homo sapiens
aattctccctaaagttcagaaaataacataatttggcttatttggtacaaaaatcatataggaagcattgtcaaatatgaaatggtgttgggtttttgagggctgcatttttaaaatatgttattagtatgtgttccaaaattatgggaaattcctataattctatataactcagtgtacattatcagtaataatcataattgttatgttaaaattattgtgtgccgcagaggtaacaaatgtccttttcaactgtgtttttgactatggctgtcctaaaactttttgtcatccatggacaatttttgtcttgttttggtcctctttagaaggtggctttataatcagctacaaaactctaacaggtgctcttgaatgcaggtttctgataactttggagattgtgacatcagaatagaggaaaactttcaggactcatggagagctataaaatattcatgagtatcaagcagaacaggaattaactgcatggactgaactgatctttttgactttttgcttaaaaagttgctgatcttttgttttggttttcagagccttacaacttttcttttgagctattggcagcttttaacaatttacgatacttccataaacaaagcttgcagcctatttcggttctctttagctgattcctgccgaataggcacactattcgctcgcactccctacctatcggccctccggcaataccccacccgcgcccaccaatcctgtcttcctcgatacctagaccccttcgtggcgcactccgttctctgaccaccagtcgggg

SEQ ID NO: 639 - DNA, 958 bp, Homo sapiens
tgcctgtatgtctgaggctgggtttgaagcctccagcgtgtttggagttaatccccattaggttggactccgcccctttctcccaaaggtaaagcaaggttttcaggcatcactgcaaagggcagctagtattcccatccttgtctaacaagctgtaaggagaagttgtttctgagatctgagcctgaagagagggaacaagtcagtcagccttcgtggtcagaagagaaacctgtgaccatgaggagcagcctgaccatggtgggaaccctctgggccttcctgtcccttgttactgctgtgaccagttctaccagttacttcctaccttactggctctttggatcccagatggggaagccagtgtcattcagcacattccggaggtgcaactaccctgtgcggggagagggacacagtctgatcatggtggaagaatgtgggcgctatgccagcttcaatgccatcccaagcctggcctggcagatgtgcacagtggtgacaggtgccggctgtgctctgctgctcctggtggcactagctgctgtcctgggttgctgcatggaggagctcatctccagaatgatgggacgttgcatgggagcagcgcagtttgttggagggctgctgataagctcaggctgtgccttataccctttaggatggaatagcccggagataatgcaaacatgtgggaatgtctccaatcaatttcagttaggtacctgtcggcttggctgggcctattactgtgctggaggtggagcagctgcagccatgttgatctgcacctggctctcttgctttgctggaagaaaccccaagcctgtcatattgggggggaagcaccatgaggaaaaccacttcttatgctatggagcttggccattgccctcaacccttgagcttcgaaaagaagaccggggggggcgggcaacagggaagcaagtgacccccc

SEQ ID NO: 640 - DNA, 958 bp, Homo sapiens; identical to SEQ ID NO: 639

SEQ ID NO: 641 - DNA, 1710 bp, Homo sapiens
tttcgtcagggctggaaggtcctggcctgggatgaagaggggactgcctaaggctggggtggctccaagatgccggcatgggaaactgggggtttcctggtaactggactcctagcaaactcccaaggattcaggatgtcgctgctgagcctgccctggctgggcctcagaccggtggcaatgtccccatggctactcctgctgctggttgtgggctcctggctactcgcccgcatcctggcttggacctatgccttctataacaactgccgccggctccagtgtttcccacagcccccaaaacggaactggttttggggtcacctgggcctgatcactcctacagaggagggcttgaaggactcgacccagatgtcggccacctattcccagggctttacggtatggctgggtcccatcatccccttcatcgttttatgccaccctgacaccatccggtctatcaccaatgcctcagctgccattgcacccaaggataatctcttcatcaggttcctgaagccctggctgggagaagggatactgctgagtggcggtgacaagtggagccgccaccgtcggatgctgacgcccgccttccatttcaacatcctgaagtcctatataacgatcttcaacaagagtgcaaacatcatgcttgacaagtggcagcacctggcctcagagggcagcagttgtctggacatgtttgagcacatcagcctcatgaccttggacagtctacagaaatgcatcttcagctttgacagccattgtcaggagaggcccagtgaatatattgccaccatcttggagctcagtgcccttgtagagaaaagaagccagcatatcctccagcacatggactttctgtattacctctcccatgacgggcggcgcttccacagggcctgccgcctggtgcatgacttcacagacgctgtcatccgggagcggcgtcgcaccctccccactcagggtattgatgattttttcaaagacaaagccaagtccaagactttggatttcattgatgtgcttctgctgagcaaggatgaagatgggaaggcattgtcagatgaggatataagagcagaggctgacaccttcatgtttggaggccatgacaccacggccagtggcctctcctgggtcctgtacaaccttgcgaggcacccagaataccaggagcgctgccgacaggaggtgcaagagcttctgaaggaccgcgatcctaaagagattgaatgggacgacctggcccagctgcccttcctgaccatgtgcgtgaaggagagcctgaggttacatcccccagctcccttcatctcccgatgctgcacccaggacattgttctcccagatggccgagtcatccccaaaggcattacctgcctcatcgatattataggggtccatcacaacccaactgtgtggccggatcctgaggtctacgaccccttccgctttgacccagagaacagcaaggggaggtcacctctggcttttattcctttctccgcagggcccaggaactgcatcgggcaggcgttcgccatggcggagatgaaagtggtcctggcgttgatgctgctgcacttccggttcctgccagaccacactgagccccgcaggaagctggaattgatcatgcgcgccgagggcgggctttggctgcgggtggagcccctgaatgtaagcttgcagtga

SEQ ID NO: 642 - DNA, 1710 bp, Homo sapiens; identical to SEQ ID NO: 641

SEQ ID NO: 643 - DNA, 1710 bp, Homo sapiens; identical to SEQ ID NO: 641

SEQ ID NO: 644 - DNA, 886 bp, Homo sapiens
tttttttttcacaagggacatcagcagaaacaccaatgtctgcactcccagccccacaagcaccttttgcagagaaaagaagtgaggtcactgggttttatttgagtccagaggggaaggcgttgactcccacccaggcccgagtgccctgaggctggaggagggaggcaggatggcagcacagagcaagggcttcctgccctcctggctgcctgcagacgggagtggagaccgtcagagcaagccccagcttctttcagaggagggtagagtccaggactagagctcttctcttgtggctgacaccttctctgagcaggccccctgggggtcccccacatagcaatgcctccagagcccctcggccttgttggtgggcttcatagatctggtcttctccaaactcccccaagtagtgcaaacatgtcctggagagcctggtatgccaggggccccctgtgaccatcacgctgatgcttggctctggcccctcgctaagtcctgggcctgtgagacgtttcacttggtccacttctcgaactccgtagtcctgccagttccgggagcagctccggtccaggacatccgtgtagaccaactcgctcacgtcccgccgccccccagagtttgaggtatgaagtttggtctctgcctttgccaaggtttttggcccacattcttggtaagccacagctctgcaggcatcacagcgcaggtgagcgggcatgtgggctgagtacatctcctcatcatccacctccggggctgtggctgtgagtggcgccataaccccgaggccccctgggatggcccaggctcccagcagcagcagcagcagtggcagtgacagcctcatggccccaggagccagttcagcaagtggtcg

SEQ ID NO: 645 - DNA, 1832 bp, Homo sapiens
tttcgtattacgtgtgctgccctttgagaagtttgttgatgaaaggagaaaggaaatagtagcaccagaggaaaagagcagggatttaccctgttcttacaggataacagctccttgctcttttcagctagcttttcaaaggacagggataggacagccccctgccttatttcggatacttggatctataacctccagaaattcaagctgaagtagctggaggtcggagaggaatgagaactgcctgggtggggtctgccagccagacactgccaggatagccacaaggagacaacttggaagaacagacagcaaccacgttggactcaggcagtcctgggtttgaatcctgtctctgtcaccacctagcctgatgaccttgggcacatcctgagcaccctgtgccttatctgtaaaatggaaacaatcatgccgacctttcagggtggttttgaggattagagactagctcctgacacacagtaggtaatcgtaaatgggtgctattatttggcccgacccacgttataggacagaacgtctaacggatgcgtcagaacctgcgccctccggatcttggagggtacagagggcgcccctcggcctcctccctttcggaggtggggacaaggtggaggaagggctgcaggaggaggagctctagcatcgcgacccgccccgtcccgtccagtctggcctgggcgccgcgggaacgctgtcctggctgccgccacccgaacagcctgtcctggtgccccggctccctgccccgcgcccagtcatgaccctgcgcccctcactcctcccgctccatctgctgctgctgctgctgctcagtgcggcggtgtgccgggctgaggctgggctcgaaaccgaaagtcccgtccggaccctccaagtggagaccctggtggagcccccagaaccatgtgccgagcccgctgcttttggagacacgcttcacatacactacacgggaagcttggtagatggacgtattattgacacctccctgaccagagaccctctggttatagaacttggccaaaagcaggtgattccaggtctggagcagagtcttctcgacatgtgtgtgggagagaagcgaagggcaatcattccttctcacttggcctatggaaaacggggatttccaccatctgtcccagggactaaagacaacctgatgaggccacctggcatgacctccagcagccagtaacttgttagggaagagacctgcttgggccacatgggtctgctgcctgtgccaccacctttcccagaacactggacttctttcctgcccttttctacaactctacgctgtgtcagctgtacagccacccccccaccccttcctttcagcctccatcagggaagagacagtaaaaataatcacagtcaagtgattcaaaacaaaacaaaaagcaactgttaaagccaagtctgccccataactttaaaagccatcattggtcactgccgatgtctatttttgaagggttgagatggacagatttcccaagatgcatatcttttgctttcagttctaacaaatgttctattagctaaaatgtgttgtactccacagagtattgggctcgtaattcttcttttttttttttagaaagggagttccatttttgttgcccaggctggagggctttagggaatttttaatttaccaaagcctccgccacccgggttaaagcatttttcttgtctaaccttcccaggtagttggaattacaggcatgccccaccccaaccgtttatttttatacttttagtaaaaagggggcttttccatgttggccagcctgctctca

SEQ ID NO: 646 - DNA, 2393 bp, Homo sapiens
gaccaaggaggcgcccgcggctgcagagctgcagagcgggatctcttcgagctgtctgtgtccgggcagccggcgcgcaactgagccagaggacagcgcatcctttcggcgcgggccggcagggcccctgcggtcggcaagctggctccccgggtggccaccgggacccccgagcccaatggcgggggcggcggcaaaatcgacaacactgtagagatcacccccacctccaacggacaggtcgggaccctcggagatgcggtgcccacggagcagctgcagggtgagcgggagcgcgagcgggagggggagggagacgcgggcggcgacggactgggcagcagcctgtcgctggccgtgcccccaggccccctcagctttgaggcgctgctcgcccaggtgggggcgctgggcggcggccagcagctgcagctcggcctctgctgcctgccggtgctcttcgtggctctgggcatggcctcggaccccatcttcacgctggcgcccccgctgcattgccactacggggccttcccccctaatgcctctggctgggagcagcctcccaatgccagcggcgtcagcgtcgccagcgctgccctagcagccagcgccgccagccgtgtcgccaccaagtaccgaccccctcgtgcagcggcttcgccccgccggacttcaaccattgccctcaaggattgggactataatggccttcctgtgctcaccaccaacgccatcggccagtgggatctggtgtgtgacctgggctggcaggtgatcctggagcagatcctcttcatcttgggctttgcctccggctacctgttcctgggttaccccgcagacagatttggccgtcgcgggattgtgctgctgaccttggggctggtgggcccctgtggagtaggaggggctgctgcaggctcctccacaggcgtcatggccctccgattcctcttgggctttctgcttgccggtgttgacctgggtgtctacctgatgcgcctggagctgtgcgacccaacccagaggcttcgggtggccctggcaggggagttggtgggggtgggagggcacttcctgttcctgggcctggcccttgtctctaaggattggcgattcctacagcgaatgatcaccgctccctgcatcctcttcctgttttatggctggcctggtttgttcctggagtccgcacggtggctgatagtgaagcggcagattgaggaggctcagtctgtgctgaggatcctggctgagcgaaaccggccccatgggcagatgctgggggaggaggcccaggaggccctgcaggacctggagaatacctgccctctccctgcaacatcctccttttcctttgcttccctcctcaactaccgcaacatctggaaaaatctgcttatcctgggcttcaccaacttcattgcccatgccattcgccactgctaccagcctgtgggaggaggagggagcccatcggacttctacctgtgctctctgctggccagcggcaccgcagccctggcctgtgtcttcctgggggtcaccgtggaccgatttggccgccggggcatccttcttctctccatgacccttaccggcattgcttccctggtcctgctgggcctgtgggattatctgaacgaggctgccatcaccactttctctgtccttgggctcttctcctcccaagctgccgccatcctcagcaccctccttgctgctgaggtcatccccaccactgtccggggccgtggcctgggcctgatcatggctctaggggcgcttggaggactgagcggcccggcccagcgcctccacatgggccatggagccttcctgcagcacgtggtgctggcggcctgcgccctcctctgcattctcagcattatgctgctgccggagaccaagcgcaagctcctgcccgaggtgctccgggacggggagctgtgtcgccggccttccctgctgcggcagccaccccctacccgctgtgaccacgtcccgctgcttgccacccccaaccctgccctctgagcggcctctgagtaccctggcgggaggctggcccacacagaaaggtggcaagaagatcgggaagactgagtagggaaggcagggctgcccagaagtctcagaggcacctcacgccagccatcgcggagagctcagagggccgtccccaccctgcctcctccctgctgctttgcattcacttccttggccagagtcaggggacagggagagagctccacactgtaaccactgggtctgggctccatcctgcgcccaaagacatccacccagacctcattatttcttgctctatcattctgtttcaataaagacatttggaataaacgagcatatcatagcctggaaaaaaaaaa

SEQ ID NO: 647 - DNA, 378 bp, Homo sapiens
acttttttatttatggaataacagatttgctggcattcactgaaagagtgcaaatattcggtccttgtgacttccactgactcttccaaattttatgaatgtatcagtgtgttggataaacccagtttcagaatggtgaagaggaaatcttggaccaaatggtgcggctggttgacggtggtacgatttctggcccgtgggtttgaaatgcacttaaagtcctgttctcgccttttattttctgaacttgccgcttttgcattctttgagttcagtttaaagacggttactttgagggcgttttgaaccctcgggctagaggtcggaccactgttggtcggccgcattgtttggtctaacgttttttcttttattgtt

SEQ ID NO: 648 - DNA, 636 bp, Homo sapiens
ggtcgacccacgcgtccgcactgtgtgcacaagagagcgataagcactctggatcatttaaaggaaaaggagatgcgactcctaccttcagaaggttataatggacttattataatggacttattatacggacaaacaaatgaacagttacacacatgcaaagctacagcagtacaagatagtatgtcatgagtgatgtgcttaatgaaacagatcatatatctgctgtatgtagggctctgttcaattctcacagcattcttatttactcctcaccatgtccttgagaggtataggtattattgtcctgattttagagagattaagaaacttggtcaaggctatacaactaattagtagaagaattaaaattcaatcctaagtctgtctgaccccaaagcccatgaatactcttaactcctatgctgtaaatataaaaagactgaacgggggccagacgtggtggctcatgcctgtaatcccagcactttgggaggatggtttgagcccaggagttcaagaccagcctgggcactatagtgagaccctgtctccattcaaaaaaaaaaaaaagggggggcctcttaaaaggctcaattttacttaccgcgtgctgcaaagttaaatgtttttatc

SEQ ID NO: 649 - DNA, 636 bp, Homo sapiens
ccgggtcgacccacgcgtccggtagaataatatttgtttgttttttgcaatgtacaaattaagggcatgaatcctggagccaaactaactgagttccaaatcctgatgctgccccatattaattctgtgaattcgggcaaatgacttagtttgtctaaacctcaattatctcatctataaaaggcagctagatcttaactcactgggttctcgtgaggattaaatgagatagtgcccctaaggtttctggtatgaaggaggcactccttaaatgttcgagacttgccagagggcttcttctctgtctggactgtgctaatgaccacagatccccggttgagaggaatgcccagaccacactcatcctacactcatccctatactcattgtcccttgggaaccaactgcagggaggaggggaaatggccaccactggagggagtactcagcaggccaagacttatgggggactcttccaaattggggccatggaaccggcactatttctactctttattttccttttggcatccttttgggttcaccgagctatagaataacctacggagacgaatttagcaaatacatcactgaagcttctccctcggaagttggacccaagccatgtgaatgggc

SEQ ID NO: 650 - DNA, 619 bp, Homo sapiens
tttttcccaataattacttcaactcacagttagttaaagcataacatgttggaaactttcttgtttaaactcttcctattcttcaccttattggttaatttatttattaccaatgaccaactcagtgtgggtagtatttttctcagcttccagctcccagctttctttcttgatatggctgaattttgagatactcaaagcaagcagaccataaagagagacagataaaactggacctgggtgttcatatgtgtatgtgtgattgtgtgttggagggttattatccctttttaaagaactacttataggatggtggcaggacctttgaaattgcaggctgaattgattattagcatatgtaaatttgggtaagttattaagcaactttcaaagtgtttttgttttctcttctgtaaaagtaggatgataataatatctaatgatcttgttgtagattaaatgatgaaaagcaccttacacagtgagtgttacgtagtaagtagacaataaatggtaacatgactattatcatcatgttgctgctatcgtggatatttgcatcttatagctttggcagactgaaaacttccttttgctgtgaaatatcttgatagacgca

SEQ ID NO: 651 - DNA, 378 bp, Homo sapiens
tgaacttggggtgttgattcagcatcacttgccatgacccccaagccctcctctcagctttctctccatgacttttctcttacacgttctggtgacagctctgtcctctcattccactgggcgtaggggtactaactgcttcatgttactttcctcagggaatcatcctatcccttgtggttccctgacaccctacccacacctttgaaaatggtgcctttattacatactcctcgggtctccccctactaaagtgggccgtctctttcctgttgaagcattgactgatacactggcgaaagggaacaccctgcctgcccttcaccccctcccaagagcctaaagagacttctgagcttcaggaagaatctgccgtga

SEQ ID NO: 652 - DNA, 400 bp, Homo sapiens
ctcaaatattctatagactgtttaaatataaaccaaactaaactatttaagttccaggatattagtgactttttacctgagatacttgctcagattatctatctgttgtgaactccattttaaaagcacctcactataccatgcttgaagtcaggtagtctgtagacttcatcacagcccctttatatataattacttctctcacggaggagtatggtgtatttacctgtatctttgaatggcttaagattagcatgcttcagctatgttcttgctcctatcaaagtgaaacctgggggtggctcagagacacgtgacgggtttagaatcccagagagcacaccctcactaaaggccggttactgcgaccataaacacttcttgcccacaattcatcttt

SEQ ID NO: 653 - DNA, 581 bp, Homo sapiens
aatttgaagtatatttaaagtcaataagcaaacattcaaaaacacttgtatgactctcctaaatctttattatttaaatagttttctattgtactcgaaaagatttgaaggtatatccttctgtgtccaaaaggtcagtataatattatgtatacattatcttcgtagcacaactatttggaataagcttttcttcagagatgtatcggcataaaggagctctgatttgtttaaatattttaaaaggtattaaaatatattttcatttgagaacctcccctatatactcaggaaagctcaccttttcaaaacctgagtgttaactctttccaaacgttctgtaatgtttatcaaaaacaaaaaataatgaaaagaggtgaacattattttggagagcctcattgtcttcatctactcagatcatccacaatcactggagaggaggcagaattttgtcactgggacagcagtcacttggcccagaatcctctacagattccctccagggagcccttcccattggctctttcctagaaatttcatgtttttggggttcctcagtaaaactttgggcttaacac

SEQ ID NO: 654 - DNA, 701 bp, Homo sapiens
gattggacttatttcccacattttttcaagctctggatattaccacacttttcactatttacctatctggaaaagcaaatatctttatatttaaatttttataacctcaatcatcagtgaaaacatttctaatgtttatatcacttgcttgcaaatcatgcattttcctgtgaactgtttcttcaagtcattacatatttttcttttactacaggtttttcttgccacttttttgagaaaaaaattaagtaaggtagccttcagttgtcttgttgaatttttctactattgttattattttttagactttgctagtagtgtttcttttttgttttgttttgttttgcttttgagacagagtcttactctgtcacccaggctggagtgcagtgacacgatcttggctcactgcaaccttcgcctcccgggttcacgctattcttctgcctcaacctcccgagtagctgggattacaggtgtgcaccaccacacctatgtaaattttgtatggacagtacagaaggcggttcactgtgttggccaggctagctgggaactcctgacctcaagggatccacccaccttggcctcccacagggctgggattacaggcatgagccaccgcacctgggcaaaagtgttccttaaaagagtgatttttctaaatagagaatacgatttgactatgttttgctttttaa

SEQ ID NO: 655 - DNA, 628 bp, Homo sapiens
ttcgagcttctcttcaatacccatatgtatctcaaagtaatgtaatcagcaaattagcagtgtaaaaatgctagataacttattctgaaatccacttccgaaatcatttgagcagctaagtttgaaaaactcatgttggtaccaacatttctctctttagtgtgtgatttttccctttttgtgcttctcctccttggctgtctctcctttctccttccccctcacttaccttgcacttccttccctctccatctctggaggcttctctctccttttatatcttttctggacttactgctgcttcttagttataaaatgaattgtataatttaaactgtttaataaatgtactttgttatttgtaattttcaagtcgggtactaaaacctttataacctttacccccctccttgaaccctctaaaattaacaaaatcatgttaagttttatataacaaggccttgggatatacttttttgttgaaattgctaggcaaatatgctcttaacaagtaattgcctggggcaggaggattgcttgagcccaggaatccgagtttgcaaggagctgtgatcaccactgcactttagcctggacaacagaaccagaaccttgctcaaaaaaaaaa

SEQ ID NO: 656 - DNA, 717 bp, Homo sapiens
ctcaggctgcctgctttttgtttgccatagctggtcctgttacctctcattttcctccctggaggcagttatgttgcctctatttaagcactcaccagtcagaatcttcctattctgcttaaatacccaacatttgtcagtaagaaataattttgtatttaattgtgtatccccaggaattttgcccatttctctttgccttgctttcaatcatgatagaagcacctttttcttttcaataatattattgttaaaagccttaattattttgtcttctctgcttcaaactaagtaattctgacttccttaatcttttatcacaggctctgttctccaaactttcagtcttttctgttgttccatattccattggtttctcctcctactcattcagaggcaaattaaggtggttttttaagttttggtttgtagactatgtcgttatgtgagaaatttactttaggtttgtattgtcaaccccatagcacaagccaggtacttaatttaggcattagtcagtgatatagattgaatatttgtccctgcgcaaatctcatgttgaattgcaatccccagtgttgggggtggcgcttggtggaaggcgaaaggatcaaggcgaccggcggcccccacccctcgggggcttttcttaacggttgtggaaattttgtgcccccccccccaaaaaaaagggtgggggaaacgtttccccccttt

SEQ ID NO: 657 - DNA, 717 bp, Homo sapiens
gccttgttttgtaacaaatgtgaggactcaaaggaacacccagcctacctctctggtctcagcttttcccagtcatgaggagctcacttctcccatgaagcccatcctgctggtcctcagctctatcacccgtgccctccttctgcagatatcaagtgtgtcttggcagtcctgcatgtggagggcaatgcctgattgtctccagactgattaccccataagccttggctttcatcaaagaacaaggcttctagatgctctctgcccagtcactcaatgccatcactctgcctggccctgtgtttgccagggagcacagacacccatctgaggaatccatgccatgaggagtttatggtctgtgaagaatacaggcaggaatttgagaaggtgtcagactgcaggaaaggagctcactctgctggggtggatatctgaggcagagatctgctggtataggggaccaactggctaagtaagtttccccaagactcacggaatttccacaacaggtgatttaggatctgaaaacctgacaattatgggtacacatgaggggggcagcctgcacaatgttctccaggtgaggagactggtggttgagttgcccattggaaaggggttgggtagccctccgggttttctttccacacacccggacttgggagcttccctggggggggagcaagggaattcccctttcttgggcccccgccc

SEQ ID NO: 658 - DNA, 419 bp, Homo sapiens
  misc_feature (1)...(419): n = a,t,c or g
tttcnccccgaatnnaaggtcgacccacgcgtccgcctttgggttatcttctctattaagtgtggatccctgaaaaatggcataccctggtggtttttctagcccctgctgaaatcctttgaaggaatgtacttatttgtcaagattcgtctaaaaatgtggtctccagaaatgaacatagatgtgctgtgagctccttgcagttgtgattgcgacactgataattaagattggtttagttgttctgttgtacttcatcaaattgttgattcacattgaatttatcaaacgtcattctattctaaaatgtgaaagtatttttaacttaaatgtaggaattcgcatgtatccaggacaagtaaatttttgtgaaacattgcagatgttagatggatttgggagaattttccaaactaagt

SEQ ID NO: 659 - DNA, 3032 bp, Homo sapiens
tttcgtgcggcggcggcggcggcgtcggcgtcggcgtcgtctacctccagcttctcctccctcctcctccgtctcctcctctctctctccatctgctgtggttatggcctgtcgctggagcacaaaagagtctccgcggtggaggtctgcgttgctcttgcttttcctcgctggggtgtacggaaatggtgctcttgcagaacattctgaaaatgtgcatatttcaggagtgtcaactgcttgtggagagactccagagcaaatacgagcaccaagtggcataatcacaagcccaggctggccttctgaatatcctgcaaaaatcaactgtagctggttcataagggcaaacccaggcgaaatcattactataagttttcaggattttgatattcaaggatccagaaggtgcaatttggactggttgacaatagaaacatacaagaatattgaaagttacagagcttgtggttccacaattccacctccgtatatctcttcacaagaccacatctggattaggtttcattcggatgacaacatctctagaaagggtttcagactggcatatttttcagggaaatctgaggaaccaaattgtgcttgtgatcagtttcgttgtggtaatggaaagtgtataccagaagcctggaaatgcaataacatggatgaatgtggagataggtccgatgaagagatctgtgccaaagaagcaaatcctccaactgctgctgcttttcaaccctgtgcttacaaccagttccagtgtttatcccgttttaccaaagtttacacttgcctccccgaatctttaaaatgtgatgggaacattgactgccttgacctaggagatgagatagactgtgatgtgccaacatgtgggcaatggctaaaatatttttatggtacttttaattctcccaattatccagacttttatcctcctggaagcaattgcacctggttaatagacactggtgatcaccgtaaagtcattttacgcttcactgactttaaacttgatggtactggttatggtgattatgtcaaaatatatgatggattagaggagaatccacacaagcttttgcgtgtgttgacagcttttgattctcatgcacctcttacagttgtttcttcttctggacagataagggtacatttttgtgctgataaagtgaatgctgcaaggggatttaatgctacttaccaagtagatgggttctgtttgccatgggaaataccctgtggaggtaactgggggtgttatactgagcagcagcgttgtgatgggtattggcattgcccaaatggaagggatgaaaccaattgtaccatgtgccagaaggaagaatttccatgttcccgaaatggtgtctgttatcctcgttctgatcgctgcaactaccagaatcattgcccaaatggctcagatgaaaaaaactgctttttttgccaaccaggaaatttccattgtaaaaacaatcgttgtgtgtttgaaagttgggtgtgtgattctcaagatgactgtggtgatggcagcgatgaagaaaattgcccagtaatcgtgcctacaagagtcatcactgctgccgtcatagggagcctcatctgtggcctgttactcgtcatagcattgggatgtacttgtaagctttattctctgagaatgtttgaaagaagatcatttgaaacacagttgtcaagagtggaagcagaattgttaagaagagaagctcctccctcgtatggacaattgattgctcagggtttaattccaccagttgaagattttcctgtttgttcacctaatcaggcttctgttttggaaaatctgaggctagcggtacgatctcagcttggatttacttcagtcaggcttcctatggcaggcagatcaagcaacatttggaaccgtatttttaattttgcaagatcacgtcattctgggtcattggctttggtctcagcagatggagatgaggttgtccctagtcagagtaccagtagagaacctgagagaaatcatactcacagaagtttgttttccgtggagtctgatgatacagacacagaaaatgagagaagagatatggcaggagcatctggtggggttgcagctcctttgcctcaaaaagtccctcccacaacggcagtggaagcgacagtaggagcatgtgcaagttcctcaactcagagtacccgaggtggtcatgcagataatggaagggatgtgacaagtgtggaacccccaagtgtgagtccagcacgtcaccagcttacaagtgcactcagtcgtatgactcaggggctacgctgggtacgttttacattaggacgatcaagttccctaagtcagaaccagagtcctttgagacaacttgataatggggtaagtggaagagaagatgatgatgatgttgaaatgctaattccaatttctgatggatcttcagactttgatgtgaatgactgctccagacctcttcttgatcttgcctcagatcaaggacaagggcttagacaaccatataatgcaacaaatcctggagtaaggccaagtaatcgagatggcccctgtgagcgctgtggtattgtccacactgcccagataccagacacttgcttagaagtaacactgaaaaacgaaacgagtgatgatgaggctttgttactttgttaggtacgaatcacataagggagattgtatacaagttggagcaatatccatttattattttgtaactttacagttaaactagttttagtttaaaaagaaaaaatgcagggtgatttcttattattatatgttagcctgcatggttaaattcgacaacttgtaactctatgaacttagagtttactattttagcagctaaaaatgcatcacatattcatattgttcaataatgtcctttcatttgtttctgattgttttcatcctgatactgtagttcactgtagaaatgtggctgctgaaactcatttgattgtcatttttatctatcctatgttaaatggtttgtttttac

SEQ ID NO: 660 - DNA, 846 bp, Homo sapiens
attcagctaatttggggctaccagaaaatgctctgccaggcctcctggataaatggggagtcagccgtgacagctgccgcttgcaagtgtcttcattgtgccagtcgctcctcacacatcctttcatttaatcctcacattatgaggtgtaatgtctttaataagcttattttatgggtaggaaattagggttatgaggttaaatatcttgtcctagatgacaaagctaatgagtaatagaaccaggattagaacccatgtaaatctttgctgtttctgccgctacaccactcccaagatgagtttctcatctgcatgtgtgagcctctgcttaatgctgctgttttgttctcctccactcctgcttttgctcctgtcctcatttgtttaatgactgggttcatttccttgatcatatttttttttccttctcctatttgaatgatgggggcacagttggccagttctttgatactgagctgtaacaatcaccatccttgcttgaagaagtccttgcttctttgaatctctcatttggcttgacatcaaagctgaaaaaggttactgatgacggtatggaccttttcaatatgcaaattatgtaatggtacaaacgactttatatcagtataataaagtgcttaccgattcatttttattgctgcctgtccatacgcgaagctgtaaaaaagaatattttaatttatgggaacgactcacatcttggaaaatgaagggaaaaaactgaatcccaagggccacctctgccctagccgggacttctggggacagggctggaccccggggacagcttcctcggctcacacgggccgcctgcgggtaccc

SEQ ID NO: 661 - DNA, 1859 bp, Homo sapiens
  misc_feature (1)...(1859): n = a,t,c or g
acctggtggaattcggcctccctcccctgtcttctcagagcaggtaatggcaagcatggctgccgtgctcacctgggctctggctcttctttcagcgttttcggccacccaggcacggaaaggcttctgggactacttcagccagaccagcggggacaaaggcagggtggagcagatccatcagcagaagatggctcgcgagcccgcgaccctgaaagacagccttgagcaagacctcaacaatatgaacaagttcctggaaaagctgaggcctctgagtgggagcgaggctcctcggctcccacaggacccggtgggcatgcggcggcagctgcaggaggagttggaggaggtgaaggctcgcctccagccctacatggcagaggcgcacgagctggtgggctggaatttggagggcttgcggcagcaactgaagccctacacgatggatctgatggagcaggtggccctgcgcgtgcaggagctgcaggagcagttgcgcgtggtgggggaagacaccaaggcccagttgctggggggcgtggacgaggcttgggctttgctgcagggactgcagagccgcgtggtgcaccacaccggccgcttcaaagagctcttccacccatacgccgagagcctggtgagcggcatcgggcgccacgtgcaggagctgcaccgcagtgtggctccgcacgcccccgccagccccgcgcgcctcagtcgctgcgtgcaggtgctctcccggaagctcacgctcaaggccaaggccctgcacgcacgcatccagcagaacctggaccagctgcgcgaagagctcagcagagcctttgcaggcactgggactgaggaaggggccggcccggacccccagatgctctccgaggaggtgcgccagcgacttcaggctttccgccaggacacctacctgcagatagctgccttcactcgcgccatcgaccaggagactgaggaggtccagcagcagctggcgccacctccaccaggccacagtgccttcgccccagagtttcaacaaacagacagtggcaaggttctgagcaagctgcaggcccgtctggatgacctgtgggaagacatcactcacagccttcatgaccagggccacagccatctgggggacccctgaggatctacctgcccaggcccattcccagctccttgtctggggagccttggctctgagcctctagcatggttcagtccttgaaagtggcctgttgggtggagggtggaaggtcctgtgcaggacagggaggccaccaaaggggctgctgtctcctgcacatccagcctcctgcgactccccaatctggatgcattacattcaccaggctttgcaaacccagcctcccagtgctcatttgggaatgctcatgagttactccattcaagggtgagggagtagggagggagaggcaccatgcatgtgggtgattatctgcaagcctgtttgccgtgatgctggaagcctgtgccactacatcctggagtttggctctagtcacttctggctgcctggtggccactgctacagctggtccacagagaggagcacttgtctccccagggctggcatggcagctatcaggggaatagaagggagaaagagaatatcatggggagaacatgtgatggtgtgtgaatatccctgctggctctgatgctggtgggtacgaaaggtgtgggctgggataagagagggcagagcccatgttttctgacataactctacacctanataagggactgaacccttccaactgcgggagctccttaaacccttctggggagcatactgggggctcttccccatcttcagccccttcctctgggttccc

SEQ ID NO: 662 - DNA, 1622 bp, Homo sapiens
gggttgagccacgcgtccggaaaaacaagcctgccacccagagacgtacaacaaaatgcgaactgtagttatttttctagacctttggatagccattaatatggttccacgttaataacagtggaaccatactgtatgttctgtttgtgttttcagtggaaaaacattacagaaatactctgaacaaccttctgtcaagtaaatttttcgagaacttatatgattatagatctgaactaatttatttaatcaatctggtatttgccttcctttttattttctaggttctggcttttataaacattgaaaatatcctcataggtcagtctttgagtgttcttattttcttgggataaagtgaattgctgagtcaaaagaatttgctcattttcaatgcatttgatacatactaccacattgctttcagaaaagttatgctagttttcccaaccagcgtttgatgggcaaaaaaaacctggtgagattgaatttatgtttattgggcttggtatttcttttttaaattgcccctcgctttttgctcattttattctcttttgcccattgcccctctttgggatatttatctcttactggtttgtaagacttctttctattaatagaggttggaaatagcagttatctaggtttttaatgttggtttgataaacactgaattttacttagtttgcattagagagcttactgttaactcttaaacatttaaattccctgttctcagttctaattttcagtgtgaaatcaggtaagatacatttgcaggtgaaaaagtttgaaatgtaaaaagataaccaaattaatttaatatttccttgggaatttgattactttttctgggagaggagttctgggcaacaacataaatactgttatttgtggatatttgcaggttacgtttggtcttcaaataagtcaacattattttctttcacaaaacttggttttctggctttctataatttcccaattaacatttaaataaaagaccaaattaaacaattaaactttatttaatttggtcttttgtttaaatgctttgtggctacctagcttaccttttcagcttttaaggaaaaaaaaaatcagaactttttattttggttcggtcggagacagcctcactctggcccccagcctgtagtgccagcccgtgatctcaacttactgtagcctctccttccagggtgaagaaattccccttgcctaagttccccccctaccccagcattgggattacagccaccggcgccagcccggctaattttgggtccagggttcctcattcccttctggtggcgcgaaccccggcactaagacctccttttccggcgctaactgggggatccgcgccctcctccctccttggcggccctccccccgtctcgttctccgtcactgctccctgcttgcgcggcgcggccgccccacgcctctgctcccctctggcgcgccggccccggcccactagaccctactacctactgcgcctccccgcctcgcccactcaccgatcaccttccccgtcggtccgctccccgtgcgccgttctccctctactatcccgcccccctctcccctattcacgctcacggctagtatct

SEQ ID NO: 663 - DNA, 1404 bp, Homo sapiens
gcccacgcgtccgcccacgcgtccgtttcccagccctgggattttcaggtgttttcatttggtgatcaggactgaacagagagaactcaccatggagtttgggctgagctggctttttcttgtggctattttaaaaggtgtccagtgtgaggtgcagctggtggagtctgggggaggcttggtacagcctggggggtccctgagactctcctgtgcagcctctggattcacctttagcagctatgccatgagctgggtccgccaggctccagggaaggggctggagtgggtctcaggttttactggtagtggtggtagtgggggtagcacatactacgcagactccgtgaagggccggttcaccatctccagagacaattccaagaacacgctgtttctgcaaatgaacagcctgagagccgaggacacggccgtatattactgtgcgaaaggccttttgcccccgcggtgggcgtatagggtgtatgaagatagtggcatcttctttgactactggggccagggaaccctggtcaccgtctcctcaagtgacatccagatgacccagtctccttccaccctgtctgcatctgtaggagacagagtcaccatcacttgccgggccagtcagagtattagtagctggttggcctggtatcagcagaaaccagggaaagcccctaagctcctgatctataaggcatctagtttgcaaagtggggtcccatcaaggttcagcggcagtggatctgggacagatttcactctcaccatcagcagcctgcagcctgatgattttgcaacttattactgtcaacagctgagtacttacgtgtggacgttcggccaggggaccaaggtggacatcaaacgaactgtggctgcaccatctgtcttcatcttcccgccatctgatgagcagttgaaatctggaactgcctctgttgtgtgcctgctgaataacttctatcccagagaggccaaagtacagtggaaggtggataacgccctccaatcgggtaactcccaggagagtgtcacagagcaggacagcaaggacagcacctacagcctcagcagcaccctgacgctgagcaaagcagactacgagaaacacaaagtctacgcctgcgaagtcacccatcagggcctgagctcgcccgtcacaaagagcttcaacaggggagagtgttagagggagaagtgcccccacctgctcctcagttccagcctgaccccctcccatcctttggcctctgaccctttttccacaggggacctacccctattgcggtcctccagctcatctttcacctcacccccctcctcctccttggctttaattatgctaatgttggaggagaatgaataaataaagtgaatctttgcacctgaaaaaaaaaa

SEQ ID NO: 664 - DNA, 1745 bp, Homo sapiens
caaagttcatagcaggttgaacatgcttgctgtcattttcacagattctggtctttcttatggggaacctgagttcctgcattaaagttcccccagaagatcaatggaaggtggattccaaagagtgggcaagtgaggaccccttctctgttaccaaggtgaccccaaggaacacagtaaatgtggcggcttatttggcctccccaggacggactggagcatcagtagtgcctgagttcatcaaaggacagatgctcaagacaccttgatcaccattaggtggaattgaaggagccaaaaatgggcgcagtggctcctcagcagagacgctcctgaatgtatagacatgggaaccactttcagcatcaaaaaaggaaacgttctgcatgcccatatccagaaaaatccccactcgctgtaacttgcggtctactaagaggaaagtcagcggcaccgtgctggcagagaggcggcttccatccctcaaactcacagtccagaatccaagctctgtggtcagctggatcttccctttgcagtgaacagattctctgcagactcccaggtcccattctgtgcttgttcccacgtccacctcccagtagtggcggccacaggtaaagcgaggggagcccaggatgcaaacggacacgtcaaatctctcggcaaggtcttgccgattctgtgtgatgagcccacttcggacgctcctgaggtcgtcagaaatgaggaggaagttgttggctgtgtcggcatccaaggtcatatccactgtgaaaaggaaaacaagttgctcagcaagtggacagaagccaaccccatgcctctcttctacttcaaaggcccaaatatctcctgactttagtttctttaattctgtttcttcctccaaaatcaaaactttttcatgagggcaacttccctgactagttcaaattctcataggtatgctttgtggcaatacccaactcttattcacagtagcaattattttactttatgtcacgtgtttgcttcattggacttttcttcatttagagtggagggtctctgaaggcagacaccatgaccccctttctaccaccttgatgcatgaaaaaatgaatgataattaagacaatgcaaatggtcgatgttaaatatgtttctgcttccatcttgtattgctcaactcagtatatagagcatgattccaggcctttgttttccatgtttgtaagcaaattaattgtgcatggttctgacagcaggtagggtatctctgcagctgacaatgtgatgacagaggtgccggtcctggacattaggaggctccaaggccaggaggaagaggggggccttagatgaaagaatgttttccatcctacatgggaggtgagaccttaagcaaaacaatggtaaattttggagtgaagagaaaggtatttgaaagttgtttgttggctgagcgcaggtggctcacacctgtaatcccagcactttgggaggccgagacgggtggatcgcgaggtcaggagatcgagaccatcctggctaacgcgtgaaaccctgtctctactaaaaaacatacaaaaaaaattggccggacatggtggcgggtgcctgtagtcctagctgctcggtagactgaggcaggagaatggcatgaacccaggaggcggagcttgcaatgagcagagatcatgccactgcacctccggcctaggcggcagagcgagactccatctcaaaaaataaaaaaaaaa

SEQ ID NO: 665 - DNA, 770 bp, Homo sapiens
  misc_feature (1)...(770): n = a,t,c or g
ttttttttttttgggatcagagtttctttatgggctataggggccacaaggctggccaggtggcaaggtcaccggtggcccggtcaccgatacaggtagtcagcctggatgttggccgcgatctcggcctcccacttgtcaccattgttgagtagcttctccttgttgtacagcaactcctcatgcgtctcggtggagaactcaaagttggggccctccacgatagcgtcaacagggcaggcttcctggcagaaaccacagtagatacacttggtcatgtcaatgtcatagcgtgtagtccggcggctgccatctgctcttggctcagcctcaatggtgatggcctgtgcaggacagatggcctcacagagcttgcaggcaatgcaacgctcctctccagatgggtagcggcgcagtgcatgctccccacggaagcgcggactcagtgggcccttctcaaaggggtagttgatggtggcaggctctcgaaagaggtatcttagggtcatgcccagtcctcggatgagttctgtccacatcagaatccgagctgcattgtcagtttcggacttcatgtccacctcagactcctgttccttcttattcacatacttgtacgttgccgccactgcgctgctatgaaggctttgtccaataagatgtcctgtgcgcatggcctgggccaaagcccgtaacagcattgatgagctcaggcgatacatctcgaagtgctgcggcgccgtncntggncganattcctcagagttctc

SEQ ID NO: 666 - DNA, 864 bp, Homo sapiens
gccggggaattcccttttcatccttgtcttcttggattctttggcgcttatgatagagttggcttttgcctcattcttaaaatgtgcttcattttctttgttgatactgttctcttttagtttcccactttggtttttcctcagctgctttgcatgctcttactcattttcctgcctcttaagtagaatttcaatccttagccccttttgtcaccttcttcctaggcaatcccatgacctttgtactaatgatttgtaaatctctagtcccagcctaggcctttgtgtaaactcctccattaagtgcctactaggagatctgcatgcctagatgttctaatgtgatctcaaactgaacatagtcaaaactcaactccctgtcacccctgtcatgccatccacaccatgccgtgctgcaccctgtcataccgcatgagccaccagaccgtcatgctctgtgacttgtctgtctgcccaattctattttgagcttcttgagggcagggatctcattttttatctctgtatcttcagtggccggcacattgagcctgctcaatgaatgcgtgagagaatggaagtacggaagaagagcgacagcctgacagcgccccaaatgttgctccttactctaaggcctgctgatcacacccaccaaaaactcatgaggcccgtcgaaatgggtctagccctgacaaggggactttttaattcaccggcgcaccccatctcgccctccaggacggacggatgatcgcacctcccccctctcgggctggcacccaacgggctttacgcctggtcgtgcacccaacatcctatgtcccgcccccccccgcggcatttcccccccccgcagacccc

SEQ ID NO: 667 - DNA, 831 bp, Homo sapiens
attagaggaactcattaaatcttttggaccaagagctaacactgaaccctagaactacctggtttcatgaatgccaaaagagatatttttagtttcacatttgtttaatgaacacaggccctggaaccatcatctgagtatagtaatttgagatataattttaagattactggaagacagtgtaataggcttgatgtctgtcctcatctggtgtttgatattctttcctcttgagtattccaggcccaagagaggcttgaaagttgataatgtgtgtttttccactgttgccctttcaacagggtctagaatttccaactggtctaactgtgaaacttgtcttcttgctgaaatgtttttccttgatttggggttttcttgaaattattgccaaagtcatatgacataaattgtaaatgccacaaaatttattctgctattcttgagataaaacatggaaatctgaaagttgaaggctaggacttgggaagagaacttaagaagctaccatttcaaaatccttaatgaagggattatattacctgcttgctttgaccttgaaagtctcttgaatgatcttgttcatctgtcagacaatccctgcgtcaatgattaataaaaacactctagcctgagggtgggcttgtgctgaaacactgagggaggcaaagtgcagcaggaattagaatttgaattccaaacccaaactatgcctagagcaagggtttctccaccctggatgtgtcacaagccagcaggatgcttttaccccccaccagcaacaccaagggaccccccccaagcccccagtggcacccatcaagccccccc

SEQ ID NO: 668 - DNA, 1652 bp, Homo sapiens
aaccgtctcgccaagcttggcacgaggcgtgcccgcttccaaaatggcggcggcggcggtatctggtgcgcttggccgggcgggctggaggctcctgcagctgcgatgcctgcccgtggcccgttgccgacaagccctggtgccgcgtgccttccatgcttcagctgtggggctaaggtcttcagatgagcagaagcagcagcctcccaactcattttctcagcagcattctgagacacagggggcagaaaaacctgatccagagtcttctcattcaccccccaggtatacagaccagggcggcgaggaggaggaggactatgaaagtgaggagcagttgcagcaccgcatcctgacggcagcccttgagtttgtgcccgcccacgggtggacagcagaggcgattgcagaaggagcccagtctctgggtctctccagtgcagcagccagcatgttcgggaaggatggcagtgagctaatactgcattttgtgacccagtgcaatacccggctcacacgtgtgctagaagaggagcagaagctggtacagttgggccaggcggagaagaggaagacagaccagttcctgagggatgcagtggaaaccagactgagaatgctgatcccatacattgagcactggccccgggccctcagcatcctcatgctccctcacaacatcccgtccagcctgagcctgctcaccagcatggtggatgacatgtggcattacgctggggaccagtccactgattttaactggtacacccgccgagccatgctggctgccatctacaacacaacagagctggtgatgatgcaggactcctctccagactttgaggacacttggcgcttcctggaaaaccgggttaatgatgcaatgaacatgggccacactgccaagcaggtaaagtccacaggagaggcactggtgcaaggactcatgggtgcagcagtgacgctcaagaacttgacaggtctaaaccagcgtcggtgagaggaaggggtataagctacaatgcctagaagagaatgagcggacagattgaaagagctttgaaaagtataaggtgccatccacataacctggtgttcacgagaacacactaaaggactcctgagtcactaccacagccacctggaaaccacaaggcatttgatgctaccgttctggtcagggattgggctgcttcttcagttcctaataccagaccaagcctcctgatgcctttctgcactgcaactgtgtgattgaaaaatgagatgttcatccaagcagtcaagccacagaaacccagcatgtccctgtcacaatctcatgggcaccttgatcatgtcttaaccttcccttaaccttggggctcccaagccagagtcaaggtctgacgccacctcaaggtgacagctcatctccagcacagcacaggcgtgtgcacacagaggtgttccttgcagccccctccctctcaggtgtcctgagatgctgctcctgggagccccctcagaaaactgcctcacctgagacaagtgcctgctggacagaggtgtgattccaggcctggtgtcacatgacaccagcatgcattgcaggattattagtgtattttgagtctgtaaaaataataaatatgtttgaagtaaaaaaaaaa

SEQ ID NO: 669 - DNA, 934 bp, Homo sapiens; identical to SEQ ID NO: 197

SEQ ID NO: 670 - DNA, 831 bp, Homo sapiens
  misc_feature (1)...(831): n = a,t,c or g
tgattcactggccggcgggactgggagaacattgtttattctattgacaatatctttcccaccacgagggcaatacccttctgagtacttgaccaatgctctttgaatttcagggcttcccaatttgaatagttttcaaatctcagttttaccagtccagtttgaactttaaagactattcctactcatcttttcagctggtttttcatttgattttataccatttcctcacatgcatgtactgatcagaactccctgctctctaatactctgcctggcaaactctagccacgctagtctacctggattctctgcttcatcttttctatttaaggagtcttgcagactccttctgaattcttcctttctgctgcatgggctagaaattctctcaggggcaattgcaggccaatgcaactcattttgtttgttttccatctctcagggatcactgtccttcaatgcctcatgcccgttgccttgaaaaccattgtttaatatattcatctggacttttaagtgcggccattggaaagataaatctagcccccgggattccatcttggcccgagagcacaggttctgctacatattggtgagccctttttggggggggcggcgcgcgattgtagacgccactaggcgcgtcaacaacatacgagaagaggagaactcgtcgggatgttgtgtacgcgcggnngacgagcccgcgancancgccgccaccccccgggccgggcccgcgccgtcctccaagcatcacatggtgcaggcggacgggtatctacgtgggacggctatatctaggcacgtggaggaccgacggcgtcg

SEQ ID NO: 671 - DNA, 1790 bp, Homo sapiens
gacggaggtgcgccaaggatccccgtggccatatggcgcgtccgactagcagtctatgcctgcttctctacttcttctctactggtaaaagcgtgcctgtatccatcttacccggcgttgtgcgcatgctgctgccaccgcctcctcatcttctgcccggccaaccggcctgccccgctgcagtgatgtgcgacaaggagttcatgtgggccctgaaaaacggagacttggatgaggtgaaagactatgtggccaagggagaagatgtcaaccggacactagaaggtggaaggaaacctcttcattatgcagcagattgtgggcagcttgaaatcctggaatttctgctgctgaaaggagcagatattaatgctccagataaacatcatattactcctcttctgtctgctgtctatgagggtcatgtttcctgtgtgaaattgcttctgtcaaagggtgctgataagactgtgaaaggcccagatggactgaccgcctttgaagccactgacaaccaggcaatcaaagctcttctccagtgatggatggatggactgataactccggaagaatgactctcctgtggcctcacactgctgcctgtctgtctgtcactctctatctgccagcttcttcagctaaatactttaagaggggtgaggggagagagaaattcataacaaatccgactaccagaaaaaaaaaattgttttggaggaggggcaaaaggaaccatgatcaggcttttactgggattcctgatcaagtaagcctcttccctttctaataaaatatacaccttatacccaagggagagcaaagacaaaatacaccagtaacatttgaccttttcagctccctagctaatttattagattgtgttgaaggtctgattctacaaaggccaactctacatatttggtagccctaactgtctgagcagtagtggctgctgtgatgtaaacttagggtgctgagataagcaattagctctagccttctgccttaagaatgcactctactggggatttcctggcatagttaagagcgctgcctataaggttggtgaccaaatctttcctcggtgactttaagctttatgtgaaagcttagttaaggtgaggaggggcacactcctaaattgctggatgactgaactttggattttctctcccctttcacatggatttcatgtctctttagataaaactgactagttttatttataaaatcttaagttttggaagtctaaaggagaaaccattccagtatgcatatttttttctcctctagattcatacatttatatagcattgaaacactttcaaactccctgctggtagtaaaaggggatttaaaaatagaatcatagccataagcctgttagtatcatatgaagagagaacagttatcttagtacctatggattttctttatttgctgtttgaatggattgaccttggttatgtgttgagaattaaggaacattctttgaaatgcctctctcagacccatcttggaggctgattacttactgcaccaaagctatcactggggtgagatttactgtttggacaaatttagccccatcccttcaaaaatacacttgtaaccagggtttcccagagttgttcattgtttgtgattgcatgtttccttccttcaactgtgttctccctggcattcagagaggagggagaggaggaagaggaaggggagggaagcttcccaagagtagcctcaacctgtgcttctgtgcattattctgagaataaatttctgtttcaaaa

SEQ ID NO: 672 - DNA, 703 bp, Homo sapiens
ctaattttggttatattatgcggccttggataaggaagtttcttaggctttcatattccaaattattggactattctaaaaacatttttaagtattttgatggatgtagtctattctaatataatgtctttcaagtgtttgaaagttactacttattcaaaactcaactgtctggcagcttttcttatcctgaactctgtgaagaacttcagggacaggaggtaaaatgtctttgaagagtaagaaatccaaaacttcatgtatttacatgttctggtcttgtctcataggattcttctttctccttacataccctcctttaaatccgtacctcccccggtcttctccatcttgcaaatggcaccaatgtccatcctagacattgatcatcccagaagtctaggaggtgattcttctcatttttttagttctgttgcgcaagccctcaccttttgcccgtttgccctcaggccttttaacaactattccttacagagaccggttttccaaaaggcccccgcattccatcatttcctggtgaaaaaattttaatgggatcctcaccccctctggatggtttaacccctcgagacccccgggaatgttgccttgccttgccttctgttttaattcgaaaaaccttgcttccctcagacggggggggaataaaagttttgggggccccccccccccccccccccct

SEQ ID NO: 673 - DNA, 732 bp, Homo sapiens
cacagtttcttccattaaggcattccaagccagtagacgtattcttctgtggccaaggtagctcaatgatttgaccttcttaaatgtgaacatttcatatgttccttgtgttttgtaatataattactgtcatcaccatgacatctttatttcttattcttctctcatgtatatttattttgataacctgttgctataaatgtagatacatttctttctcctttacattttccgtcacaccctccggtttctttgttagcatcctccagtatcttgcccacattctcctacttattactcttcaattccatttcagagtctgttacgtgaacataattacccttatccctcttgcacaaatctttctttaatctgttggatgactctgaaaggattagtttcagtttggggcttgagctgtgtccagacacacaactgctattagttcctaccatagttctacctgggtcagaagaatgagaaaaataatccttactttttcctcctctatgagcaggaggtgcttactttttactgatttgaccagctgaacattttaagataatattcagcactgtagatgaagattagaaattactgcgcaaactttaagtgagaataaaagaatttatgggggtcctcacaaaattttaaaccaaagtatctttcacttatcgggcttctctaaagtaagaccacagccattttgcggggtcatttcaccattacctc

SEQ ID NO: 674 - DNA, 366 bp, Homo sapiens
ggaagagctagttctacttttgtccaagtctagggctagagaccagtttccaacatacataattttcacaaagtctagaactcaggttcctagacttctttatgcagctatggggttttttgaatttaaacttcccctgctcttctctttgcttttgggcccttgggagcagaggcttcaccttggttttggctgtaactcccattaactctactgggtgggcagcacatctcccccagcatgtcaagatgagattattttccatccaattgttttaatgttgtgggtgttgagtgagtctacatttaatctttggtttcattataaggttcagagcagacagagtgtggggagaacatacacccg

SEQ ID NO: 675 - DNA, 360 bp, Homo sapiens
actactttgccgctacacattcttagtgaatagcctccttggcatgtttttgaaaacttaaatgttgctggtaatcatgtcacagcaatctccttggagagcctttgtgtcctgttctcagaagaaatatgccgtttttccatgttaatggttttgaaattagtgatttgctctattttcattggaaaggaaggtcactttgtgatttcctaccttccctcattttctctgaacattcaggatactcttaagtcagttcatcagccatgcagtgcactgtctggttataacatgcctgaaaagccagaggaatgttctatcaaagagcggcatccctattctcagagactgttcttagaa

SEQ ID NO: 676 - DNA, 709 bp, Homo sapiens
gaatattccttttttaaaacatactttaaaaaatcttttcttacctgtgaaagcttatggcacatagtaggcatttagcaaatgttggtttccttccttttagaccgacatttggttgggactggttttaactaccttgaggacttttcttatctcacccatctcaaatgtctcctcccctgtagggtgtatgggcatcagctgcaagttgcttcttctgactagagtctgctacctgatcaccccgttagatcttgagaggtttcccttcccaaacactgagcaggtgacatttccggaacgcagagttagcgtcttcctgctgcctctgagctggtgtttggacacaaggctgcccagagagcctggctgcaggtgtcgacacagctctccacaggacgtggttggcggcagtcacctggtcaccacaactcttctaagcctcccagctcgggaattctggacctcttgcatcctctaaattggatgctgtctgatatttccaaaaggataccatgcttgatgagatcaaaggaggagaggatgactcagaaaagacccagaagagctcacagtgctcttagcaggatgcttagtgacatggagtcctctgacagcaatagtgcttggagacatttttacacctatgggcacaggcacatgcgtacacccccccccccccccccaacaaaacctgctggccgaatgg

SEQ ID NO: 677 - DNA, 394 bp, Homo sapiens
tctagagtcataatatatctgtctggaacatagtagattcttaataaatattggaatgaaagtttaatgctttgaaaaaggcttcttttacgtctactaaagttctagctcaggatactggaggggttttatttacttttttttcctcttcatgaaaatctagactcttaaaatccagtatctttagtagataatttgcatttatttattatccaagttttacatcttggcgtttttccagcagggatacctctcatgattctgttccactgtgagaaattatatgcacttagaagctttgatttctggttcatgttagaacttctcagtacatggcccagggctttggggctgctgtgtcctggtctggccattgaggctcatgaaggctgag

SEQ ID NO: 678 - DNA, 624 bp, Homo sapiens; identical to SEQ ID NO: 206

SEQ ID NO: 679 - DNA, 340 bp, Homo sapiens
  misc_feature (1)...(340): n = a,t,c or g
ggtccactgatctntggtgggtattatttgccagagcaacaattcaccgttcttccatagagcgtgcccagtacacgtatgtggcttttctgtgcctgggtcagcacgtggggccagggctgcccaccaggcagggggcagatgatctacgcatctcatcacctctcagttcacaccacgtctccccatcactggctttcagcgtgggcccttcaaggtggggccgtctttcctgagctggctcacggggcgtcatctgcgtcttctggccaagctgatgattccacctgctctttttgctctccctggagagtctctgcagagcacaaatcactaacct

SEQ ID NO: 680 - DNA, 1753 bp, Homo sapiens
tttcgtgctgaaaatctgggtcacagctgaggaagacctcagacatggagtccaggatgtggcctgcgctgctgctgtcccacctcctccctctctggccactgctgttgctgcccctcccaccgcctgctcaggactcttcatcctcccctcgaaccccaccagccccagcccgccccccgtgtgccaggggaggcccctcggccccacgtcatgtgtgcgtgtgggagcgagcacctccaccaagccgatctcctcgggtcccaagatcacgtcggcaagtcctgcctggcactgcacccccagccaccccatcaggctttgaggaggggccgccctcatcccaatacccctgggctatcgtgtggggtcccaccgtgtctcgagaggatggaggggaccccaactctgccaatcccggatttctggactatggttttgcagcccctcatgggctcgcaaccccacaccccaactcagactccatgcgaggtgatggagatgggcttatccttggagaggcacctgccaccctgcggccattcctgttcgggggccgtggggaaggtgtggacccccagctctatgtcacaattaccatctccatcatcattgttctcgtggccactggcatcatcttcaagttctgctgggaccgcagccagaagcgacgcagaccctcagggcagcaaggtgccctgaggcaggaggagagccagcagccactgacagacctgtccccggctggagtcactgtgctgggggccttcggggactcacctacccccacccctgaccatgaggagccccgagggggaccccggcctgggatgccccaccccaagggggctccagccttccagttgaaccgctcactcagtggtcagcgtttcctgcacactttacctctcatgtgcgtttcccggcctgatgttgtggtggtgtgcggcgtgctcactctctccctcatgaacacccacccacctcgtttccgcagcccctgcatgctgctccagaggtgggtgggaggtgagctgggggctccttgggccctcatcggtcatggtctcgtcccattccacaccatttgtttctctgtctccccatcctactccaaggatgccggcatcaccctgagggctcccccttgggaaatggggtaagtgaagggccccagacttcacccccagcccactgctaaaatctgttttctgacagatgggttttggggagtcgcctgctggcactaacatggaggaaaggggactcccattggcccttcccttttctcctaacagtccctttggtctggtctgtcctgggctgtctgtgtgtgtgccattctctggacttcagagccccctgagccagtcctcccttcccagcctccctttgggcctccctaactccacctaggctgccagggaccggagtcagctggttcaaggccatcgggagctctgcctccaagtctacccttcccttcccggactccctcctgtcccctcctttcctccctccttccttccactctccttccttttgcttccctgccctttccccctcctcaggttcttccctccttctcactggtttttccaccttcctccttcccttcttccctggctcctaggctgtgatatatatttttgtattatctctttcttcttcttgtggtgatcatcttgaattactgtgggatgtaagtttcaaaattttcaaataaagcctttgcaagataaaaaaaaaaaaa

SEQ ID NO: 681 - DNA, 1538 bp, Homo sapiens
tcctgtctcgacgatttcgcggccgcctccgcggggctgtgggaagcttgggctgtcccgggaccgtcagtctcctcctctgaccctccctttccccttgtgtgtagggccgccgtcccacccccacctcgccggagtccggggcggccccggtgtcccctccgagcctgctgcactccacgtccccctaccagggctccagcccccagggaaatctccgaccaggcccgcccaggagccagatccaggctcctggaagaaccatgtccggcagctactggtcatgccaggcacacactgctgcccaagaggagctgctgtttgaattatctgtgaatgttgggaagaggaatgccagagctgccggctgaaaattacccaaccaagagaaatgtaggctgggtaccctgaatcaccccctgcaggatggactttctggtcctcttcttgttctacctggcttcggtgctgatgggtcttgttcttatctgcgtctgctcgaaaacccatagcttgaaaggcctggccaggggaggagcacagatattttcctgtataattccagaatgtcttcagagagccatgcatggattgcttcattaccttttccatacgagaaaccacaccttcattgtcctgcacctggtcttgcaagggatggtttatactgagtacacctgggaagtatttggctactgtcaggagctggagttgtccttgcattaccttcttctgccctatctgctgctaggtgtaaacctgttttttttcaccctgacttgtggaaccaatcctggcattataacaaaagcaaatgaattattatttcttcatgtttatgaatttgatgaagtgatgtttccaaagaacgtgaggtgctctacttgtgatttaaggaaaccagctcgatccaagcactgcagtgtgtgtaactggtgtgtgcaccgtttcgaccatcactgtgtttgggtgaacaactgcatcggggcctggaacatcaggtacttcctcatctacgtcttgaccttgacggcctcggctgccaccgtcgccattgtgagcaccacttttctggtccacttggtggtgatgtcagatttataccaggagacttacatcgatgaccttggacacctccatgttatggacacggtctttcttattcagtacctgttcctgacttttccacggattgtcttcatgctgggctttgtcgtggttctgagcttcctcctgggtggctacctgttgtttgtcctgtatctggcggccaccaaccagactactaacgagtggtacagaggtgactgggcctggtgccagcgttgtccccttgtggcctggcctccgtcagcagagccccaagtccaccggaacattcactcccatgggcttcggagcaaccttcaagagatctttctacctgcctttccatgtcatgagaggaagaaacaagaatgacaagtgtatgactgcctttgagctgtagttcccgtttatttacacatgtggatcctcgttttccaagaaaaaaaaaa

SEQ ID NO: 682 - DNA, 1057 bp, Homo sapiens
  misc_feature (1)...(1057): n = a,t,c or g
ggcggatggggaaacaattgagattgagggaggcaggcagagcggagcgaaaacaggaggacagaaatagcgaagcaaggccaagatcgggacccccaccagggaggtgcccagtacagacatgaaagtaaggcgggaaagcagctcaagcctcacccaccgccctgcccccagccccgccactcccaggctcctcgggactcggcgggtcctcctgggagtctcggaggggaccggctgtgcagacgccatggagttggtgctggtcttcctctgcagcctgctggcccccatggtcctggccagtgcagctgaaaaggagaaggaaatggacccttttcattatgattaccagaccctgaggattgggggactggtgttcgctgtggtcctcttctcggttgggatcctccttatcctaagtcgcaggtgcaagtgcagtttcaatcagaagccccgggccccaggagatgaggaagcccaggtggagaacctcatcaccgccaatgcaacagagccccagaaagcagagaactgaagtgcagccatcaggtggaagcctctggaacctgaggcggctgcttgaacctttggatgcaaatgtcgatgcttaagaaaaccggccacttcagcaacagccctttccccaggagaagccaagaacttgtgtgtcccccaccctatcccctctaacaccattcctccacctgatgatgcaactaacacttgcctccccactgcagcctgcggtcctgcccacctcccgtgatgtgtgtgtgtgtgtgtgtgtgtgtgactgtgtgtgtttgctaactgtggtctttgtggctacttgtttgtggatggtattgtgtttgttagtgaactgtggactcgctttcccaggcaggggctgagccacatggccatctgctcctccctgcccctgtgggccctccatcaccttctgctcctaggaggctgctttgttgcccgagaaccagccccctcccntgattttaggggatggcgtaggggtaaggagcaaggggcagtggtnttcaagtngttttnggtt

SEQ ID NO: 683 - DNA, 1930 bp, Homo sapiens
aactgatacaatgcatctgacacgccagcttggacgaggaccgagcttggctgtgtttatctcgttggggactaaggcgtcggttggcgcgcaacgggttctaggctgcaggcagctcgaggacccgcggccccgccccggctcggcctggcagatagcagaggcagcaggccgtgccgggggggcatgttgctgtaaccagtggcccaggggatgttacggtggacagtgcacctggagggcgggccccgcagggtgaaccatgctgcagtggctgtcgggcatcgggtatactccttcgggggttactgctctggtgaagactatgagacactgcgtcagatagatgtgcacattttcaatgcagtgtccttgcgttggacaaagctgcccccggtgaagtctgccatccgtgggcaagctcctgtggtaccctacatgcgctatggacactcaaccgtcctcatcgacgacacagtcctcctttggggcgggcggaatgacaccgaaggggcctgcaatgtgctctatgcctttgacgtcaatacgcacaagtggttcacaccccgagtgtcagggacagttcctggggcccgggatggacattcagcctgtgtcctaggcaagatcatgtacatttttgggggctacgagcagcaggcggactgtttttccaatgacattcacaagctagataccagcaccatgacatggactcttatctgtacaaagggcagccctgcacgctggagggacttccactcagccacaatgctgggaagtcacatgtatgtctttgggggccgtgccgaccgctttgggccattccattccaacaatgagatttactgcaaccgcattcgagtctttgacaccagaactgaggcttggctggactgtcccccgactccagtgctgcctgaggggcgccggagccactcggcctttggctacaatggggagctgtacatctttggtggttataatgcaaggctgaaccggcacttccatgacctctggaagtttaatcctgtgtcctttacctggaaaaagattgaaccgaaggggaaggggccatgtccccgccggcgccagtgctgctgtattgttggtgacaagattgtcctctttgggggtaccagtccatctcctgaggaaggcctgggagatgaatttgaccttatagatcattctgacttacacattttggactttagccctagtctgaagactctgtgcaaactggccgtgattcagtataacctagaccagtcctgtttgcctcatgatatcaggtgggagctgaatgccatgaccaccaacagcaatatcagtcgccccatcgtctcctcccatgggtaggaggaagtttctgccacctcccctcctgagcctgctgtcatcttcactgcccctgcccatctgtcacccacctgctcctttgacccctggacttggtatacctccatgtggagttgttgggcgagaggtgttctctgtgctgtgaattcagtggggagctgtagcggggtgggggctaggttcctccccccttgggccgagggccccttccccttggtgctctgtccccatccacctcctttcagctgctcctgggcctcagctctgcccagggccagccaggttctgctgggaagggaagggaatggggagaagggagaagcaagcagtgtctgagcctcaggagcttccccctccccctttgcctatcccctcccctctgcttgagccttgagccttgactgggagctgaaaggagttgcagctgttggcatgagacctccttctccccgtcttggggaggtggggaccagcagataaatcccacccttccttgagctgtcgctgtactctgaagttcagccagctcagattttataaaaattaattaaaatctccaaaaaaaaaa

SEQ ID NO: 684 - DNA, 1576 bp, Homo sapiens
tagagggaagcctgcaaccggaagtgaaggcagatttccctccttcgtcgctgttgctgccgccatacgcgctctccctgtttagttatggcagagaacgatgtggacaatgagctcttggactatgaagatgatgaggtggagacagcagctgggggagatggggctgaggcccctgccaagaaggatgtcaagggctcctatgtctccatccacagctctggctttcgtgacttcctgctcaagccagagttgctccgggccattgtcgactgtggctttgagcatccgtcagaagtccagcatgagtgcatccctcaggccattctgggaatggatgtcctgtgccaggccaagtcgggcatgggaaagacagcagtgtttgtcttggccacactgcaacagctggagccagttactgggcaggtgtctgtactggtgatgtgtcacactcgggagttggcttttcagatcagcaaggaatatgagcgcttctctaaatacatgcccaatgtcaaggttgctgttttttttggtggtctgtctatcaagaaggatgaagaggtgctgaagaagaactgcccgcatatcgtcgtggggactccaggccgtatcctagccctggctcgaaataagagcctcaacctcaaacacattaaacactttattttggatgaatgtgataagatgcttgaacagctcgacatgcgtcgggatgtccaggaaatttttcgcatgaccccccacgagaagcaggtcatgatgttcagtgctaccttgagcaaagagatccgtccagtctgccgcaagttcatgcaagatccaatggagatcttcgtggatgatgagacgaagttgacgctgcatgggttgcagcagtactacgtgaaactgaaggacaacgagaagaaccggaagctctttgaccttctggatgtccttgagttcaaccaggtggtgatctttgtgaagtctgtgcagcggtgcattgccttggcccagctactagtggagcagaacttcccagccattgccatccaccgtgggatgccccaggaggagaggctttctcggtatcagcagtttaaagattttcaacgacgaattcttgtggctaccaacctatttggccgaggcatggacatcgagcgggtgaacattgcttttaattatgacatgcctgaggattctgacacctacctgcatcgggtggccagagcaggccggtttggcaccaagggcttggctatcacatttgtgtccgatgagaatgatgccaagatcctcaatgatgtgcaggatcgctttgaggtcaatattagtgagctgcctgatgagatagacatctcctcctacattgaacagacacggtagaagactcgcccattttggaatgtgaccgtctgtccttcaggagaggacaccagggtgggggtgaaggagacactactgcccccacccctgacagcccccaccccatggcttccatcttttgcatcaccaccactcctgaacccccatttctgatttgtcagaatttttttttaacaaaactaaaaatgaaaaaaaaaaaaaa

SEQ ID NO: 685 - DNA, 1576 bp, Homo sapiens; identical to SEQ ID NO: 684

SEQ ID NO: 686 - DNA, 1464 bp, Homo sapiens
actagttctagatcgcgagcggccgctcgcgatctataatgcctcttctgaagcagccatcccggcctcttggtactgctgaccccagccaggctacagggatcgattggagctgtccttggggctgtaattggccccagctgagcagggcaaacactgaggtcaactacaagccacaggccccttccccagcctcagttcacagctgccctgttgcagggaggcggtggcccttctgttgctagaccgagcctgtgggatataccaaggcagaggagcccatagccatgaggagcctcggggccctgctcttgctgctgagcgcctgcctggcggtgagcgctggccctgtgccaacgccgcccgacaacatccaagtgcaggaaaacttcaatatctctcggatctatgggaagtggtacaacctggccatcggttccacctgcccctggctgaagaagatcatggacaggatgacagtgagcacgctggtgctgggagagggcgctacagaggcggagatcagcatgaccagcactcgttggcggaaaggtgtctgtgaggagacgtctggagcttatgagaaaacagatactgatgggaagtttctctatcacaaatccaaatggaacataaccatggagtcctatgtggtccacaccaactatgatgagtatgccattttcctgaccaagaaattcagccgccatcatggacccaccattactgccaagctctacgggcgggcgccgcagctgagggaaactctcctgcaggacttcagagtggttgcccagggtgtgggcatccctgaggactccatcttcaccatggctgaccgaggtgaatgtgtccctggggagcaggaaccagagcccatcttaatcccgagagtccggagggctgtgctaccccaagaagaggaaggatcagggggtgggcaactggtaactgaagtcaccaagaaagaagattcctgccagctgggctactcggccggtccctgcatgggaatgaccagcaggtatttctataatggtacatccatggcctgtgagactttccagtacggcggctgcatgggcaacggtaacaacttcgtcacagaaaaggagtgtctgcagacctgccgaactgtggcggcctgcaatctccccatagtccggggcccctgccgagccttcatccagctctgggcatttgatgctgtcaaggggaagtgcgtcctcttcccctacgggggctgccagggcaacgggaacaagttctactcagagaaggagtgcagagagtactgcggtgtccctggtgatggtgatgaggagctgctgcgcttctccaactgacaactggccggtctgcaagtcagaggatggccagtgtctgtcccggggtcctgtggcaggcagcgccaagcaacctgggtccaaataaaaactaaattgtaaactcctaaaaaaaaaa

SEQ ID NO: 687 - DNA, 1905 bp, Homo sapiens
ccaggcgggcgctcggggagttcccctccacaggagctatcaggatttttctggcaccaagtttaactctttttcgtgcttttgggggggacagatctgggggacagatttatctgttgaatactcttgggcaggaaaaccatgtaaaacctctggaagcagcatcaggacagcagagcagagcccccgtcctcactgctcacttgcacagaaactccatctggactcggatgcttttactgaagacccatctagcttcaatcatctttagagtccatccattctggagagacctggcgtttgcagttgcctcctgtggccgtgtttttctgtcattctgttcccaggccttctattcaggcggttgaagggtgtggactttggaatggggtttgctgttcttcgggaacttgcttcctttccctggctggcgctgtcaggaaggaccatctgaaggctgcaatttgttcttatggaggcaggtgctggcctggcctggatcttccaccatgttcctgttgctgccttttgatagcctgattgtcaaccttctgggcatctccctgactgtcctcttcaccctccttctcgttttcatcatagtgccagccatttttggagtctcctttggtatccgcaaactctacatgaaaagtctgttaaaaatctttgcgtgggctaccttgagaatggagcgaggagccaaggagaagaaccaccagctttacaagccctacaccaacggaatcattgcaaaggatcccacttcactagaagaagagatcaaagagattcgtcgaagtggtagtagtaaggctctggacaacactccagagttcgagctctctgacattttctacttttgccggaaaggaatggagaccattatggatgatgaggtgacaaagagattctcagcagaagaactggagtcctggaacctgctgagcagaaccaattataacttccagtacatcagccttcggctcacggtcctgtgggggttaggagtgctgattcggtactgctttctgctgccgctcaggatagcactggctttcacagggattagccttctggtggtgggcacaactgtggtgggatacttgccaaatgggaggtttaaggagttcatgagtaaacatgttcacttaatgtgttaccggatctgcgtgcgagcgctgacagccatcatcacctaccatgacagggaaaacagaccaagaaatggtggcatctgtgtggccaatcatacctcaccgatcgatgtgatcatcttggccagcgatggctattatgccatggtgggtcaagtgcacgggggactcatgggtgtgattcagagagccatggtgaaggcctgcccacacgtctggtttgagcgctcggaagtgaaggatcgccacctggtggctaagagactgactgaacatgtgcaagataaaagcaagctgcctatcctcatcttcccagaaggaacctgcatcaataatacatcggtgatgatgttcaaaaagggaagttttgaaattggagccacagtttaccctgttgctatcaagtatgaccctcaatttggcgatgccttctggaacagcagcaaatacgggatggtgacgtacctgctgcgaatgatgaccagctgggccattgtctgcagcgtgtggtacctgcctcccatgactagagaggcagatgaagatgctgtccagtttgcgaatagggtgaaatctgccattgccaggcagggaggacttgtggacctgctgtgggatgggggcctgaagagggagaaggtgaaggacacgttcaaggaggagcagcagaagctgtacagcaagatgatcgtggggaaccacaaggacaggagccgctcctgagcctggcttcagcttgcttggggcc

SEQ ID NO: 688 - DNA, 1882 bp, Homo sapiens
aagaaccctgaggaacagacgttccctcgcggccctggcacctccaaccccagatatgctgctgctgctgctgctgcccctgctctgggggagggagagggtggaaggacagaagagtaaccggaaggattactcgctgacgatgcagagttccgtgaccgtgcaagagggcatgtgtgtccatgtgcgctgctccttctcctacccagtggacagccagactgactctgacccagttcatggctactggttccgggcagggaatgatataagctggaaggctccagtggccacaaacaacccagcttgggcagtgcaggaggaaactcgggaccgattccacctccttggggacccacagaccaaaaattgcaccctgagcatcagagatgccagaatgagtgatgcggggagatacttctttcgtatggagaaaggaaatataaaatggaattataaatatgaccagctctctgtgaacgtgacagccttgacccacaggcccaacatccttatccccggtaccctggagtctggctgcttccagaatctgacctgctctgtgccctgggcctgtgagcaggggacgccccctatgatctcctggatggggacctctgtgtcccccctgcacccctccaccacccgctcctcagtgctcaccctcatcccacagccccagcaccacggcaccagcctcacctgtcaggtgaccttgcctggggccggcgtgaccacgaacaggaccatccaactcaatgtgtcctaccctcctcagaacttgactgtgactgtcttccaaggagaaggcacagcatccacagctctggggaacagctcatctctttcagtcctagagggccagtctctgcgcttggtctgtgctgttgacagcaatccccctgccaggctgagctggacctggaggagtctgaccctgtacccctcacagccctcaaaccctctggtactggagctgcaagtgcacctgggggatgaaggggaattcacctgtcgagctcagaactctctgggttcccagcacgtttccctgaacctctccctgcaacaggagtacacaggcaaaatgaggcctgtatcaggagtgttgctgggggcggtcgggggagctggagccacagccctggtcttcctctccttctgtgtcatcttcattgtagtgaggtcctgcaggaagaaatcggcaaggccagcagcggacgtgggagacataggcatgaaggatgcaaacaccatcaggggctcagcctctcagggtaacctgactgagtcctgggcagatgataacccccgacaccatggcctggctgcccactcctcaggggaggaaagagagatccagtatgcacccctcagctttcataagggggagcctcaggacctatcaggtcaagaagccaccaacaatgagtactcagagatcaagatccccaagtaagaaaatgcagaggctcgggcttgtttgagggttcacgacccctccagcaaaggagtctgaggctgattccagtagaattagcagccctcaatgctgtgcaacaagacatcagaacttattcctcttgtctaactgaaaatgcatgcctgatgaccaaactctccctttccccatccaatcggtccacactccccgccctggcctctggtacccaccattctcctctgtacttctctaaggatgactactttagattccgaatatagtgagattgtaacgtgtttgtctctctgtgcctggcttatttcactcaacataacatcctctaagttcatctgtgttgtttccaatgacagagtaatgtactgaataattcaaaatagctaaaagagaggagtttaaatgttgtcaccaaaaaaaaaa

SEQ ID NO: 689 - DNA, 1882 bp, Homo sapiens; identical to SEQ ID NO: 688

SEQ ID NO: 690 - DNA, 403 bp, Homo sapiens
caggtgggccatggccttctccagctgcttttccttttcggccacctcgagggcggcaaagtgcgcaggctgcaccagcttgtacccagagcccagcaccacccgggtcagagcctcgtggctgctcatctcactctccaggttctgcgggggaggaggcaggaggatgcggatgttgctgacccttgggggactcccacagatgtgcttgaagtttcacgggaccccactaacttgtccccaaggagttccctgtccccatgactcccaaagaatccagggcattccaaaagcccccacaggcagagagttcctggctgggccacagagagtgccatttccttggctgagaagccctgctcatgtgcgaggccagccctccccgggtgggcccacacctggg

SEQ ID NO: 691 - DNA, 417 bp, Homo sapiens
tatcatctcacaagtgcacgccaaggtcagtgagtgtgagaagggccagcgcctcagggagatcgcagggaagatggacctgaagtcttccagcaaactcaagaacgggctcaccttccgcaaggaagacatgcctcagcggcagctccacctggagggcatgctatgctggaagaccacatcagggcgcttgaaagatatcctggctatcctgctgaccgacgtacttttgctgctacaagaaaaagatcagaaatacgtctttgcttctgtggactcaaagccacccgtcatctcgttacaaaagctcatcgtgagggaagtggccaacgaggagaaagcgatgtttatgatcagcgcctccttgcaagggccggagtgtattgcggccgctcgagaggatccaagcaaacagaa

SEQ ID NO: 692 - DNA, 365 bp, Homo sapiens
acccttcgttatcattcaagtccttctggccagataaagagatgaccccagggaacatcctgaccaggccggcttcctggatggctgtgttcaatgccatgcccaccatctgcttcggatttcagtgccacgtcagcagtgtgcccgtcttcaacagcatgcagcagcctgaagtgaagacctggggtggagtggtgacagctgccatggtcatagccctcgctgtctacatggggacaggcatctgtggcttcctgacctttggagctgctgtggatcctgacgtgctcctgtcctatccctcggaggacatggccgtggccgttgcccgagccttaatcatcctgagcgtgctcacctgtatt

SEQ ID NO: 693 - DNA, 2663 bp, Homo sapiens
cattcacctggtggaattctccccacccccccagcatcaataaagtgtcataaacagaatattcttcatttttgtgcatgtcctggggccagccaggcagggactgattcccccccacaactccccagcacagtctggagaatggcatggattcagacaaacacttttatattaaaagctaggggttagcaggactggagtacgcaggctgcccacaagttcctagcttgcaggctctggctctcgaggtcccacacgcctgatgtcaatcacctgaagccgctccagggcagtctggaggatttccaccacggcttcttccttctcgtcaccctcctctggcatttccgactcagggagctggaaggcctggctcatgtaggtgttcactgtctgcttgtccaggctggggtcgatggtcatcaggccccctcgcagcttgggcagagtcacttcctcatggagttctatgccaagctcctgctttagctgctgtaagtactcgtccttctcatccatgtattgttcccagagtttttgcacaaagggctcactctggccctcctcatcctccataaacagtgagcggtagttgagcaagtctgcattgctgctgctgggatgccagccccctgcctccatcagctcctggatttgctcttctgtcttgagagggaaggtactcttgaggacagtgttgaactgctccatggttagtagcccctcgttctgactgtcagcatttgtcatctccttcagcagctgggctactgtctccttctgggtgacatacacattctcactccgctttcccatcaagactgcatagaactgactcataacctcgttggagtggaagatcttgatattttcaaaaatagtataagcccaggccatggcatcactgggcccaaagcgatgctccaggaaattgaagaagaaatctgggaacgtctctttctgctcctcagcaagacgttccttccaggcatccttgaggaggttgaccacgtccttcttgcttggcttcttgttctccacgaggccatcaaaccgaagaaaagcagggatggcttccccatagccctaggagggaggatatcagctcatctctggacccatctgtggccccacccccaatcagggaagatccccagttggttccccaaaagcttgtctgagcagcagggcatggctgttctgactctggcccaagccccactcctggggcctcccctaccagaccagggaagaagtctttctcccgcagcagccccgaaccaatctcttccaggagcacgtccaccagctggtcgctgttcttgccctcagccagcatctgccagcgctctgggcccccagccaccacatctgcatgtggggagagggagctggagtctgggcccacatgtaagcaggacctggggccctgccggctgccctcacctttgcacttggtccagtcaggccgcggcgtggaagtgcgctggatctcctgcagctcagagaagaattggtcccgttccttcagcgtgctcatgtgcagctgcatgaggatctcatgctccttgcgaacctcctcgtagctggctctcagggtgtccagctgtgggcaaggacattggccctggccccccacctgtgagaccccgtcctaccctcctggccctgcctgcctgccagcacctgctcctgaagatccttgttggtcttctcctgcatttcaaagtccctcctggggaccacatctccaaagttggccttcatgttgttgagttccatctgcgtgcgggtcaggtcttgccgggtcatcttaagagccagggttaacttcacagggtcctccccccagatgcctggcgactgggctaatgacatgtcctcccgctggtaccgcagctcattcaggtctgcgatgaggatcttacaggcatctcgctcactgaggtagtgcaggtactcctcagccaagttcttcctcagtttggtcacctcgctctgcaatgaaatcttctcctcattctttttgtcgatgagttttagcaagttcatcttctctttcttgagcagggagatttcatatttctcctcagctctcatggccaggatcctctcattgcagtcctcattcacagtgacaagcttggccttcaggggctccagagcccgaatcttctccctttggtgggcagcgtccttcgtttctgggtggaatctgtgcccaggtccagcaggaggagctccttgcgtaggtagttttccagttcctccaagtactggggcttggcagtgcgaaaggggtgctgctggcagctccagcgtccttcgtttctgaagaagcttgcgattctgggtgctcttgtcttctgtgagaaaggattcgtctatggtcactcctgaaggccgtggctgtaatcgttttgctagcacgtaacgtcttcactgggctaaatcagcccgattctaaccattgactctgtggtgctggagccctagatcaatggtcagaggccagcaggaggtgcagaggtccggatcaagtgccatttccctctctagaagtactcaaaccctcatctctgccctcatccctgccagcgcctacctcgacgcggacgagaagctgtggtaccgcgactgctggcaggccatgacccacgggc

SEQ ID NO: 694 - DNA, 2121 bp, Homo sapiens
gaggcggaattcggtgaccgtctggctgctggagcagaagctgcaggtctgctgcagggtggaggaggtgtggctggcagagctgcagggcccctgtccccaggcaccacccctggagcccggagcccaggccctggcctacaggcccgtctccaggaacatcgatgtcccaaagaggaagtcggacgcagtggaaatggatgagatgatggcggccatggtgctgacgtccctgtcctgcagccctgttgtacagagtcctcccgggaccgaggccaacttctctgcttcccgtgcggcctgcgacccatggaaggagagtggtgacatctcggacagcggcagcagcactaccagcggtcactggagtgggagcagtggtgtctccaccccctcgcccccccacccccaggccagccccaagtatttgggggatgcttttggttctccccaaactgatcatggctttgagaccgatcctgaccctttcctgctggacgaaccagctccacgaaaaagaaagaactctgtgaaggtgatgtacaagtgcctgtggccaaactgtggcaaagttctgcgctccattgtgggcatcaaacgacacgtcaaagccctccatctgggggacacagtggactctgatcagttcaagcgggaggaggatttctactacacagaggtgcagctgaaggaggaatctgctgctgctgctgctgctgctgccgcaggcaccccagtccctgggactcccacctccgagccagctcccacccccagcatgactggcctgcctctgtctgctcttccaccacctctgcacaaagcccagtcctccggcccagaacatcctggcccggagtcctccctgccctcaggggctctcagcaagtcagctcctgggtccttctggcacattcaggcagatcatgcataccaggtatggggcggggctcgctggaggctcatgctcatagctgactcatcacgggccagcttgattacaggctaccgaccaccctgatggaaggctgagccctttggccaaattgctaatctcttctacaaggaaacaaaaggaaaccgaattcactgctcaataaatgtgggaattcctggagttatctacattggcagctgtcatgagtggttactaggaatctagctaaatccctaagtaactgggcgatggatttgggtgggggaattgtcacacctctgcttataagagaggatggagtcgtgtagttgggcttcccacgtgacgtctaggtcctagaattgtgttctgtggacagacagtccagcacgcatgttttgaatacttcctacgggccaagaattggactaagactttcaggttgaagaaggcttagtccctgcccttgtggagggcatggttcagattgagagagaaatgaatatgtaactatggttaattataataaccagtcaaagtactaattactagaggcatgagaaggtgttgtaggtaccagagggaccaacctattttgcccttgtggatgagaaacttatcacagagggtgacatttaggatggtcttcgctgcatgtagtaggtactcaaggaacatgcagccttgctgtgtgctgatatttcttaaaattcttttgtgcctattttatcagtctgtgggccaatttgcaaattagttattaaaaggtattgctttcagtgagaaagctttatgaaatgggccagccctcctccttgttagaatgagtggccgcttagcgatttcatgtttggcccacttggagctgtggctgacctatggggcccagacatgtagctggtgttttcacaaatagccctgaacctggatacccatgagcacactactactctcaagcagttgctggaagatcccatatcttatcccagccatgccccctagacgcagaaggcttggggcctcttttggcacgtgccatggcatgttcttggtaggtgatccagttgagaagttaaatcttctgcggtgattaagtcatgaggctagcacgtagaccagcgctgagggaagggttccaggatgagattggagccttgcaataagggagactactgcaaggcattggatgatactccagtgttgga

SEQ ID NO: 695 - DNA, 413 bp, Homo sapiens
tttcgtttcgtgctgattctaactcggcctgtttccttagcatctgttccttcagtagggaacttttcatgcgctcctgttcactagtgtccaaagctctcagggttcgggcataaaggacgacaatgtcactgtgcctggctttcttgttgcactggggacattttcgtacttgtcctttaagccacgtggaaatgcacctatacccaaagagatgcccacagcgtaatgctgagagccggtggtccccagcattggtccactgttccagacatattgtacaagtgtccccttcttcctcatccatagaagcagaaggtagcagaggctcagacttctggggagatggctgtttggggagggtcttgcctccatcgatacatgtaacttcttgctctgctgagacacctgcc

SEQ ID NO: 696 - DNA, 1072 bp, Homo sapiens
gggggcggcgagaggaaacgcggcgccgggccgggcccggccctggagatggtccccggcgccgcgggctggtgttgtctcgtgctctggctccccgcgtgcgtcgcggcccacggcttccgtatccatgattatttgtactttcaagtgctgagtcctggggacattcgatacatcttcacagccacacctgccaaggactttggtggtatctttcacacaaggtatgagcagattcaccttgtccccgctgaacctccagaggcctgcggggaactcagcaacggtttcttcatccaggaccagattgctctggtggagagggggggctgctccttcctctccaagactcgggtggtccaggagcacggcgggcgggcggtgatcatctctgacaacgcagttgacaatgacagcttctacgtggagatgatccaggacagtacccagcgcacagctgacatccccgccctcttcctgctcggccgagacggctacatgatccgccgctctctggaacagcatgggctgccatgggccatcatttccatcccagtcaatgtcaccagcatccccacctttgagctgctgcaaccgccctggaccttctggtagaagagtttgtcccacattccagccataagtgactctgagctgggaaggggaaacccaggaattttgctacttggaatttggagatagcatctggggacaagtggagccaggtagaggaaaagggtttgggcgttgctaggctgaaagggaagccacaccactggccttcccttccccagggcccccaagggtgtctcatgctacaagaagaggcaagagacaggccccagggcttctggctagaacccgaaacaaaaggagctgaaggcaggtggcctgagagccatctgtgacctgtcacactcacctggctccagcctcccctacccagggtctctgcacagtgaccttcacagcagttgttggagtggtttaaagagctggtgtttggggactcaataaaccctcactgactttttagcaataaagcttctcatcagggttgaaaaaaaaaaaa

SEQ ID NO: 697 - DNA, 2177 bp, Homo sapiens
gccacgggtgagtcgggtcgtggctgctgccgggtcctgcgcgctccggactgaggtggcgtccctgggccggacggcggtgtcccggcgtggcgggaagccggcactggagcgggagcgcactgggcgcgggaccgggaggcgcagggaccggacggctcccgagtcgcccacctgacggtaccgagagggcggcgcccctccgagcagagccgtcccggccactcccctgggatctgacttggctcttgcggtcgcgggcaccgtgaagccctggggtgtgcgtggctcctcctggtaggcgccctttcccggcgtccggcttggggtggtggtggcgttgactccagccccgcctctccctggagaggagggctccactcgctccttcggcctcctcccctggggccgcagcgactcgggccggcttcctgcttccctgcctgccggcggtcccgctggctagaaaaagtcttcacttcccaggagagccaaagcgtgtctggccctaggtgggaaaagaactggctgtgacctttgccctgacctggaagggcccagccttgggctgaatggcagcacccacgcccgcccgtccggtgctgacccacctgctggtggctctcttcggcatgggctcctgggctgcggtcaatgggatctgggtggagctacctgtggtggtcaaagagcttccagagggttggagcctcccctcttacgtctctgtgcttgtggctctggggaacctgggtctgctggtggtgaccctctggaggaggctggccccaggaaaggacgagcaggtccccatccgggtggtgcaggtgctgggcatggtgggcacagccctgctggcctctctgtggcaccatgtggccccagtggcaggacagttgcattctgtggccttcttagcactggcctttgtgctggcactggcatgctgtgcctcgaatgtcactttcctgcccttcttgagccacctgccacctcgcttcttacggtcattcttcctgggtcaaggcctgagtgccctgctgccctgcgtgctggccctagtgcagggtgtgggccgcctcgagtgcccgccagcccccatcaacggcacccctggccccccgctcgacttccttgagcgttttcccgccagcaccttcttctgggcactgactgcccttctggtcgcttcagctgctgccttccagggtcttctgctgctgttgccgccaccaccatctgtacccacaggggagttaggatcaggcctccaggtgggagccccaggagcagaggaagaggtggaagagtcctcaccactgcaagagccaccaagccaggcagcaggcaccacccctggtccagaccctaaggcctatcagcttctatcagcccgcagtgcctgcctgctgggcctgttggccgccaccaacgcgctgaccaatggcgtgctgcctgccgtgcagagcttttcctgcttaccctacgggcgtctggcctaccacctggctgtggtgctgggcagtgctgccaatcccctggcctgcttcctggccatgggtgtgctgtgcaggtccttggcagggctgggcggcctctctctgctgggcgtgttctgtgggggctacctgatggcgctggcagtcctgagcccctgcccgcccctggtgggcacctcggcgggggtggtcctcgtggtgctgtcgtgggtgctgtgtcttggcgtgttctcctacgtgaaggtggcagccagctccctgctgcatggcgggggccggccggcattgctggcagccggcgtggccatccaggtgggctctctgctcggcgctgttgctatgttccccccgaccagcatctatcacgtgttccacagcagaaaggactgtgcagacccctgtgactcctgagcctgggcaggtggggaccccgctccccaacacctgtctttccctcaatgctgccaccatgcctgagtgcctgcagcccaggaggcccgcacaccggtacactcgtggacacctacacactccataggagatcctggctttccagggtgggcaagggcaaggagcaggcttggagccagggaccagtgggggctgtagggtaagcccctgagcctgggacctacatgtggtttgcgtaataaaacatttgtatttaaaaaaaaaaaa

SEQ ID NO: 698 - DNA, 854 bp, Homo sapiens
aaatggctaaatgcaggtagacactcatgcagagatcctgacccctaagatgaggggaccacactagtctcatcttggtgtgacttttcacattaaggcagtattcagtcgtgtggatgcagacatggcacacaccagatgttcacagtggcctggagggtgggagggtggagcctgggacaaccagagcaggtaaaaatttacatgggagctccccaaaataaaagagctgcagagcggggagatggagtggtggggatttgcgggctgggtaccaaaagctctgcatttctcccttcaaatccttggctgaccctgaactgtacaagcacagggcactctccagaggatcccaggaaaacttctgtggaggttgaaagagctgatcagagatgtcagcagttgcccacagtagcaaagagaattgcaagttccagtccatcaagttagaagaccttggtaaacttgtatatttccactgaaataccataaggatcatattttaggagtaagcactgcatctcaacactgagagacttgccctataaagaatagcaaattttagccaacccttgctaaagatgtctaaaattaagccttcccaagggcaaagcgatccaccagtacttttagtggcccggttgatcaaccgtcatattttcgcgtagaatataaaatcccaggcctttaccacatgtaacctacatatccttttacttaataaaattctttttttcgagctttacgttttcggtgtacaatgccttcttgggtgtttatcgatatcacacctcttatcttttgtcattggagtaactttatgtttcgccacgtttcctgtccgatcctatgac

SEQ ID NO: 699 - DNA, 551 bp, Homo sapiens
cagctgtagtgacaatctcagagcagcttctacaccacagccatttccagcatgaagatcactgggggtctccttctgctctgtacagtggtctatttctgtagcagctcagaagctgctagtctgtctccaaaaaaagtggactgcagcatttacaagaagtatccagtggtggccatcccctgccccatcacatacctaccagtttgtggttctgactacatcacctatgggaatgaatgtcacttgtgtaccgagagcttgaaaagtaatggaagagttcagtttcttcacgatggaagttgctaaattctccatggacatagagagaaaggaatgatattctcatcatcatcttcatcatcccaggctctgactgagtttctttcagttatactgatgatctgggtgggggacagagccagattcagagtaatcttgactgaatggagaaagtttctgtgctacccctacaaacccatgcctcactgacagaccagcattttttttttaacccgtcaataaaaaaataatctcccagaaaaaaaaaa

SEQ ID NO: 700 - DNA, 1545 bp, Homo sapiens
  misc_feature (1)...(1545): n = a,t,c or g
tggtggaattccccggcgccgcgccatgtgggctgcggcgggcgggctgtggcgctcccgcgcgggtctccgggccctgttccgtagccgcgatgctgcgctatttccaggctgcgagcggggacttcactgctctgctgtctcctgcaagaactggctcaagaaatttgcctcgaaaaccaaaaaaaaggtttggtatgaaagtccttccttgggttctcactcgacttacaaaccatccaagttggaattcctcatgaggagcacctcaaagaaaaccaggaaggaagaccatgcgcgcctgagggccctgaacggcctcctctataaggcactgacagacctgctgtgtacccctgaagtgagtcaggagctgtatgaccttaacgtggagctctccaaggtttccctgactccagacttctcagcctgccgagcgtactggaagacaacgctctctgctgagcagaacgcacacatggaggctgtcctgcagagaagtgccgcgcacatgaggcaccttttgatgtcccagcagaccctgaggaatgtgccaccgatagtgtttgttcaagacaagggaaatgcagctctagctgagcttgatcagttactggcagtcgcagactttggaccccgggatgaaagagacaactttgtacaaaatgatttcagggaccctgatgccccacaaccctgcggcaccacagagccgaccacaagctccagtctgtgtgggatcgatcatgaggcgctcaacaagcagattatggagtacaaaaggaggaaagataaagggctcgggggcctggtgtggcaggggcaggtggctgagctgacaacgcagatgcaaaagggaaggaagagggccaagccccgcctggagcaggacagctccctcaagagttacctgtcaggcgaggaggttgaagatgacctggacctggttggtgccccggagtacgaatgctatgccccggacacagaggagttggaggcagagagaggaggtggcagaacagaggatggccacagctgcggagcaagcagggagtagatggagaggctctgcccatcccacatttgcagggaaaagcattggcacgcaacgcagcatgtggcttcattgaggcagttgatggagttaaaccatctgctcttctgctacttcaacattttctagcttttccgtgtatctaaacacaatttgctacacaagtcactgtttttttttccatgcactgtgtgtaatttaaaaattaaatggccatcttatcacagattctcacaaaaagaaaatggtaaaatagtgtctctgagatgctggcatggccacctccacctgcagagccctgccaggtgccagtgagtgcttggcccgaggggtcaggccacagcagtggccggggtgagaactgaacctgcaaacctggggagaacagagggtccccagagcctcccaaccccctggagctgggctccgtcccttgggctgctgggctggcacgnggcgccggggctccatccctgggctgctggtcggcc

SEQ ID NO: 701 - DNA, 1441 bp, Homo sapiens
gttaagatggaatagttttattcagcaaacaaaaaacttgctaattcagagtatcctctagtccaccgtaatgtgggtttagactacatttgcaaaattagggccttgacggctgaacaaaataaaatccagaggaagaactacagtatccaatcaaaaaggaagtactagcaaatgaaccagaataaaagactttattgtattccatacattcacaggtcacttccagatttagtaacaacactgcaatgctatgatgctgtgcggtcatttagcttaaaccacagtgtaagttggtagctctctcctgctctcttggcctctagatgtatcacaatacaattcctaactgtggcctggcaaccaatgcttatttcattggattattttctgactgggacatgagttcatcgcatcttcccagaattttaaagtaccttcccttacattataagagatgaccaaacactctagtgtgagggctgcttcacacactgttcttatctatcatgattgctcttccttacatacacgtcccgtacagatcagctacacacggcatggtcctgaaaccacagcttttgtttctttggccagaatgcacccctcaccttgagtgcccgccttagaaacacaggtacttggttctcacagggtgtgcatggttgacacaagttcatctgccccacggtaaaagctcttcaaaacctttgcatgacttgtggggagcagggtcacaatttgttgcatgtgacctgcctcagcctcaaaagataagagatcatgaggctccaccgcccccgggctcaggaaacttgatccacatcgctagggctctgcctgttaggttatggatgctcacctgactctctgaagcagagggaggctgacacagattagcttttattgaaattattaaagtgcaactttgtgttttcactctatcaggcactgaaaagcaagaagcttttaattttttcttttctataatgaaatatattttctttactcttatttgtatctgtaatacacctgcaattagaaacagcagttaaacataaaacaaagaacagagcagaaggcacagtctaaagagtgggtatcagaagaattttaccatttacgctcataggaatactaaaccaaacccaatcagaccaaactccaaagcccattgtgtttacaagtctgcctcttttgtgtgatagcaagtcagtcctttaaagcagaaaccccatttactaaccctacatcccaagtaagcaggcctgtatcagaaccaaacagctgtcctcttacatcagaaaatctaagtgatctgaaagacaattcatcacaagtgtttccaattttcttctgagaacatcaccaatcccactaatgcaaactcagaacattacttcagtcaaatttcgctaaatgctatagctttcttcaaata

SEQ ID NO: 702 - DNA, 371 bp, Homo sapiens
gcatcagctcgtagggactgagccagggttggagtccagactgacttgctggatctgcagctttctccttttcagcactgctgggttctatcgtgagaacagatgggctcatggccatgacggttaggaggtctgccttatgctagctcatctctcctttgagcgtagcctgatccttcatcttattttctcaggcatagcagtgtccataaaggccctaacaaagacttggatgcccccagagatggggagctcaccagtctataaggctttcagccttctccagtgcaggctctctgcacagaaatggggctcctgccactcccagaacacccttcactggcctgtgtggggtcctcagaccacccttc

SEQ ID NO: 703 - DNA, 411 bp, Homo sapiens
ctggctatctacatggaagggtagggtttatgacggcaatacacaatagaagatgcctttggcaagaccgctgctctccttagagagaatatcttgccaatggctttgcttcatatctgcgtggggcaccctctcctttccttccccaaggctggggacttttctttttcatctcaagatgacccctctgagctgacagcaggagccaaagacaaagaattttcttgccttctcgttatctgcctccaacccgccccgagcactcgttccctcttctcttggcagctatttttgctcagtttctctctggtttcttttactttgatttataggggtgaatttaagaaatctggtgaggctaaggactatttgacccaagtccagggacccatagactgtgggaaactctta

SEQ ID NO: 704 - DNA, 631 bp, Homo sapiens
atgttacgtgggttgtaaatgtaattgttaatattatttaaaaatttttgaaaagtgatttttagtggtggccttatcatatctacatattattactccaccattttgggatgtttaggtcgaatcctggttttttcttcttttgctgttgtaagtcatgtatattggcaattagcctaggagagattcctagaaatgagttcactgagaatatgagcttaagagaaagtgaggatttaaagccagatctgtctgccttcaaatccagcgctctttatactgatgtgagttctcctgtcttttttacctatcagaattctagaactctcccagagaaaccaggcagatactgctccacaccggtgagctgcttctcacctgggtagtctagggtggtttgctccagaattgtatttctgctttttctttttttaacttggcagtggttaaccattccctggagcagcaccaggtaagtcagcttgtatcagagtcatctgctttacctgacatgagcacacgttggcatatatttgcacatgcagatatcatatgttaaacaatatcacattgttgaagaaaattacactggaaagcgtaaaatatagcttggatgccacattgagtggac

SEQ ID NO: 705 - DNA, 414 bp, Homo sapiens
atttaagagtatgtgcttaaacagtttaatagtgcatgtgcgttggaacttttaaaaataagtcatatggatacagggctgctgcttaaggatgtgcaggttatacagttgtgcaaggatgccattgttctccactgttctcttttctaatgtttatattaatgatttccttctgcagaaacctgaaaatactacaagccaaccactttctaatcagcgagttgtagaggtggcgatccctcatgtagggaaatttatgattgaatcaaaggagggggggtatgatgacgaggtaccttttacagccctctgcaccattgctacttaacttttgctatttaatacaaatactttgggcatgcctgcaccctcatacttaatgtctattgccacataacatacagctttgccccc

SEQ ID NO: 706 - DNA, 852 bp, Homo sapiens
aaagagctaagggaatggggaagtttcaacatcatgggactattgaactgtaattcagaagacacagtcaaataaaactacaagtagaagctcggagaaaaagctgctgccttctcagctgctacgaggtgaggagtcagggatggggattcaatggacatgtgaatggccgtcgtctctgtcacctgggtggaagttcatagcatgtctctggttctccatgtgggggtcacgccctccactttctcaagctatgagtcacaagcaatggcccatgctgtgtagctccatttctaacccggaagcttctggaacggaactgttcacctaccattttcatatgatgggatacattgaaaggttttggccgacagaagaattagctcaacgctgtagtttgcataaagagctgccctgcactgtgttcacagagaagcactgctcttgcactttcctcatggtgtttggggtttgcacatgagacttagctcatgtggctaagcccatgggtttccaggcgaaagaaaaggcttataactagcaaggtgtccctagggtctcaagtgagggagacagagcagaggggacttctgaaggcctgaggcacccctgactgctgcatggtaaaatttcttaggtgaagccaagttttctttctggacagtggtcactgggggcaatgaaaccggatcatcgggaagggatctgggcttccttctgggtaaaagcctcgtgtagatgaaattgaaactaccctcctcttgttgtctgccctttttgtccagctgcattttcaagactcctgaaaaaataaaggcagggaaaaaaaaaaaaggcgccccttttaaaacc

SEQ ID NO: 707 - DNA, 1987 bp, Homo sapiens
ggaattcaaaaagtaaaactaacactttttcttatttttaagtgagggatctgactccttaattttctagtttttcttttaatcaagggctctattactgtcaccattgagaaattgtaataatatcaagagacatgtaggtaagtggtcactttaggtacaaaatattgattgggttaagcccagttgctggcattggttgggtgtagagagtaacaaaaaaagaaagaaggacgtagatatgactatttaaaagaggctcttaattttgtaactcctgttatgtgaatctaaaggtctgattgttaaagcagttgaacccaaagttcttgttttatgtggcttactcatggtagtttggcattgctaaccactctgggcttgcaactttcttgttaatttttgcaacattattctcgcttgatttttttctttacttctctgactggtctttcttaaacctgtctttgagtgtatactcttacatttgatgttcctctggattatctcttcacccctcttctttctcatgatgctcttgcacattatttttaaaaatattacccactcttgatagtgtatctgcactgagacatgtactggaagctatatattgtttgacatctcaatctaaaacaactcatctttcttacttatgactagagttcctcctcttcatttatattcttttcttggtgaacatcagtgtctaccaatttctaaatgcaaaggagaaagatacaattttaagcgaaatggtggcgatatgcacaacttgcagaaggttacataaaacttgggttttcagagatgattttttcttttctttttaggatatgttcagggaatgagtgatttactttcccctcttttatatgtgatggaaaatgaagtggatgccttttggtgctttgcctcttacatggaccaaatgcatcagaattttgaagaacaaatgcaaggcatgaagacccagctaattcagctgagtaccttacttcgattgttagacagtggattttgcagttacttagaatctcaggactctggatacctttatttttgcttcaggtggcttttaatcagattcaaaagggaatttagttttctagatattcttcgattatgggaggtaatgtggaccgaactaccatgtacaaatttccatcttcttctctgttgtgctattctggaatcagaaaagcagcaaataatggaaaagcattatggcttcaatgaaatacttaagcatatcaatgaattgtccatgaaaattgatgtggaagatatactctgcaaggcagaagcaatttctctacagatggtaaaatgcaaggaattgccacaagcagtctgtgagatccttgggcttcaaggcagtgaagttacaacaccagattcagacgttggtgaagacgaaaatgttgtcatgactccttgtcctacatctgcatttcaaagtaatgccttgcctacactctctgccagtggagccagaaatgacagcccaacacagataccagtgtcctcagatgtctgcagattaacacctgcatgatcactgttcttgcttttttgggaagagacactttgttgcaaccctttttcaagtacttgaaagttgaaaatttgaaatcttggtattgatcatgctttaaggtttatgtaaagaaagtgtactgatgttcttacattaaagctttacaaagatttaaactaattatttttgtagttacttctaccaaatagcctttccttttcgataacattcctcagtatttttatagccaagtacattttattttcttgctgatgaactggaattggataaatattgcaagtggatgagttggaaattatgcactttgaaaaacattcactttgtttaagcttattgggtttcagatttgattaaattaaatgtggaggctttctatagcattctaagctgagaagtagattgttacccagtaatgaaataaaaaat

SEQ ID NO: 708 - DNA, 400 bp, Homo sapiens
atctggcctggtgcctgggtccatgggtgccagcctggcactggggttcactgaggtggttctagtgctggggttcacagtaaagttaggggctcacttgactctccttcctccacttggagggcatctatctccatactgtgctgcacaggcttgggaaggggtgaaacaattaatgtgcaactgtagttcctatcctcttcaatgcatcatttgttgtatctatgctacacccgggtgctacaatctatcatttggaatccttagctcttgtgaaggtatttttgtctatgagtggttattcgaaatgcttctgtgaagaaacaaatgctgaaaactactattctgacattttactaacatcactcttcctatttaacttttaaatatgatgaagtca

SEQ ID NO: 709 - protein, 54 aa, Homo sapiens
MGKSLASQFPITLIFSAFSSTFCLLDGLFISCPCTSTELPKVNSLLSRPESATT

SEQ ID NO: 710 - protein, 55 aa, Homo sapiens
MLALSSSFLVLSYLLTRWCGSVGFILANCFNMGIRITQSLCFIHRYYRRSPHRPL

SEQ ID NO: 711 - protein, 171 aa, Homo sapiens
MKVLWAALLVTFLAGCQAKVEQAVETEPEPELRQQTEWQSGQRWELALGRFWDYLRWVQTLSEQVQEELLSSQVTQELRALMDETMKELKAYKSELEEQLTPVAEETRARLSKELQAAQARLGADMEDVCGRLGAVTAVMVQGHARPEQPRSCGWRVRLPPAQAGVSGSLR

SEQ ID NO: 712 - protein, 54 aa, Homo sapiens
MFRRLTFAQLLFATVLGIAGGVYIFQPVFEQYAKDQKELKEKMQLVQESEEKKS

SEQ ID NO: 713 - protein, 365 aa, Homo sapiens
MSLLGFLLSRLGLLLKVLLDWPVEVLYGAAALNGLFGGFSAFWSGVMALGSLGSSEGRRSVRLILIDLMLGLAGFCGSMASGHLFKQMAGHSGQGLILTACSVSCASFALLYSLLVLKVPESVAKPSQELPAVDTVSGTVGTYRTLDPDQLDQQYAVGHPPSPGKAKPHKTTIALLFVGAIIYDLAVVGTVDVIPLFVLREPLGWNQVQVGYGMAAGYTIFITSFLGVLVFSRCFRDTTMIMIGMVSFGSGALLLAFVKETYMFYIARAVMLFALIPVTTIRSAMSKLIKGSSYGKVFVILQLSLALTGVVTSTLYNKIYQLTMDMFGGSCFALSSFLSFLAIIPISIVAYKQVPLSPYGDIIEK

SEQ ID NO: 714 - protein, 130 aa, Homo sapiens
MFLFLFFLVAILPVNTEGGEIIWGTESKPHSRPYMAFIKFYDSNSEPHHCGGFLVAKDIVMTAAHCNGRNIKVTLGAHNIKKQENTQVISVVKAKPHENYDRDSHFNDIMLLKLERKAQLNGCCEDYCPS

SEQ ID NO: 715 - protein, 261 aa, Homo sapiens
MLVLLVLRVSLAALVKMELLVRWAPVACLVREVALEPLALLVLVEMMVLLVLPGPLVPPAPLVLLASLVLLVLRVKLVPKGPEALKVPRVCVVSLAPLALLVLLALLETLVLRESLVLKVPMVLLVLLVLLASLVPEAPLDPRAPAALLVPRVTAVNLVLLAAKETLVLRESLALLVFKDPLALLERKESEELEVNPDPLACPDPLASVVDLVAVVSLAQMVLLVPRVPLVNVVLLALLAPKDLLVKLVVPVKLVCLVPRV

SEQ ID NO: 716 - protein, 53 aa, Homo sapiens [sequence omitted]

SEQ ID NO: 717 - protein, 182 aa, Homo sapiens
MGWTMRLVTAALLLGLMMVVTGDEDENSPCAHEALLDEDTLFCQGLEVFYPELGNIGCKVVPDCNNYRQKITSWMEPIVKFPGAVDGATYILVMVDPDAPSRAEPRQRFWRHWLVTDIKGADLKEGKIQGQELSALPGSLPHRHTVAFHRYQVLCLSSGREKSSLSFPRKTKLEALGKWTDF

SEQ ID NO: 718 - protein, 87 aa, Homo sapiens
MRRSFWTVMRTAWRCSCSSVDRALSHQAGLQGQCLSACLLGNLGYPPFISPPAQVLCAARASCHLGSLMAHFETLVHSKDWSCVILK

SEQ ID NO: 719 - protein, 314 aa, Homo sapiens
MLFWVLGLLILCGFLWTRKGKLKIEDITDKYIFITGCDSGFGNLAARTFDKKGFHVIAACLTESGSTALKAETSERLRTVLLDVTDPENVKRTAQWVKNQVGEKGLWGLINNAGVPGVLAPTDWLTLEDYREPIEVNLFGLISVTLNMLPLVKKAQGRVINVSSVGGRLAIVGGGYTPSKYAVEGFNDSLRRDMKAFGVHVSCIEPGLFKTNLADPVKVIEKKLAIWEQLSPDIKQQYGEGYIEKSLDKLKGNKSYVNMDLSPVVECMDHALTSLFPKTHYAAGKDAKIFWIPLSHMPAALQDFLLLKQKARAG

SEQ ID NO: 720 - protein, 119 aa, Homo sapiens
MSVPTMAWMMLLLGLLAYGSGVESQTVVTQEPSLSVSPGGTVTLTCGLTSGSVSTSFYPSWYQQTPGQAPRTLIYSTNTRSSGVPGRFSGSILGSKAALTITGAQADDESDYYCVLICR

SEQ ID NO: 721 - protein, 1070 aa, Homo sapiens
  misc_feature (1)...(1070): Xaa = any amino acid or nothing
MNCDVLWCVLLLVCMSLFSAVGHGLWIWRYQEKKSLFYVPKSDGSSLSPVTAAVYSFLTMIIVLQVLIPISLYVSIEIVKACQVYFINQDMQLYDEETDSQLQCRALNITEDLGQIQYIFSDKTGTLTENKMVFRRCTVSGVEYSHDANAQRLARYQEADSEEEEVVPRGGSVSQRGSIGSHQSVRVVHRTQSTKSHRRTGSRAEAKRASMLSKHTAFSSPMEKDITPDPKLLEKVSECDKSLAVARHQEHLLAHLSPELSDVFDFLIALTICNTVVVTSPDQPRTKVRVRFELKSPVKTIEDFLRRFTPSCLTSGCSSIGSLAANKSSHKLGSSFPSTPSSDGMLLRLEERLGQPTSAIASNGYSSQADNWASELAQEQESERELRYEAESPDEAALVYAARAYNCVLVERLHDQVSVELPHLGRLTFELLHTLGFDSVRKRMSVVIRHPLTDEINVYTKGADSVVMDLLQPCSSVDARGRHQKKIRSKTQNYLNVYAAEGLRTLCIAKRVLSKEEYACWLQSHLEAESSLENSEELLFQSAIRLETNLHLLGATGIEDRLQDGVPETISKLRQAGLQIWVLTGDKQETAVNIAYACKLLDHDEEVITLNATSQEACAALLDQCLCYVQSRGPQRAPEKTKGKVSMRFSSLCPPSTSTASGRRPSLVIDGRSMAYALEKNLEDKFLFLAKQCRSVLCCRSTPLQKSMVVKLVRSKLKAMTLAIGDGANDVSMIQVADVGVGISGQEGMQAVMASDFAVPKFRYLERLLILHGHWCYSRLANMVLYFFYKNTMFVGLLFWFQFFCGFSASTMIDQWYLIFFNLLFSSLPPLVTGVLDRDVPANVLLTNPQLYKSGQNMEEYRPRTFWFNMADAAFQSLVCFSIPYLAYYDSNVDLFTWGTPIVTIALLTFLLHLGIETKTWTWLNWITCGFSVLLFFTVALIYNASCATCYPPSNPYWTMQALLGDPVFYLTCLMTPVAALLPRLFFRSLQGRVFPTQLQLARQLTRKSPRRCSAPKETFAQGRPXEGLGNRGTHQGGQSRPLCPCPSLLGTHSSRSAPWRPAGSPAQWT

SEQ ID NO: 722 - protein, 647 aa, Homo sapiens [sequence omitted]

SEQ ID NO: 723 - protein, 93 aa, Homo sapiens [sequence omitted]

SEQ ID NO: 724 - protein, 45 aa, Homo sapiens
MLIAVIACICYLSLLHSYDILFGHFSVLSQGLDKHCLTLFLSLGG

SEQ ID NO: 725 - protein, 120 aa, Homo sapiens
MVIINCSPRFWFLFPFTIQHTCKCPLGVRYHTRHLEQIAANKKHCPYPYEVHYNSSYWRAGIILHTLHAYLTSYPHYYSFFFFFFGKGVPFCPQGGGAGKGSGLMGSHRGTKPKSFLKKK

SEQ ID NO: 726 - protein, 47 aa, Homo sapiens [sequence omitted]

SEQ ID NO: 727 - protein, 55 aa, Homo sapiens; identical to SEQ ID NO: 255

SEQ ID NO: 728 - protein, 51 aa, Homo sapiens
MVILDVLELYHMWFLGILYDAIFYCFVHAINADKFFGLKLTKSATVSQNSQ

SEQ ID NO: 729 - protein, 54 aa, Homo sapiens; identical to SEQ ID NO: 257

SEQ ID NO: 730 - protein, 166 aa, Homo sapiens
MVGLGGMSQLLLASLLPPVPQGSPTRRKLPASLLVSTALISPVCVRGWMWQNLQNRIHGSHTSARRVPSLPGAGQVGVRWEAGPACRTQPSPQNLAPRPHPSAAQLIENAALRSAMSGERLFPEGQEHLGPLVAPRVPMGGALCPPLPSLSCAICKVGAAREAGGR

SEQ ID NO: 731 - protein, 64 aa, Homo sapiens
MKPYCMYPFLSGLLSSLLFWVESLMLLCVQMVLFLMLCVLDYRIYCIKIYVSIILLMSIWIISI

SEQ ID NO: 732 - protein, 64 aa, Homo sapiens; identical to SEQ ID NO: 260

SEQ ID NO: 733 - protein, 90 aa, Homo sapiens
MAAAPGLLVWLLVLRLPWRVPGQLDPSTGRRFSEHKLCADDECSMLMYRGEALEDFTGPDCRFVNFKKGDPVYVYYKLARGWPEVWAGSK

SEQ ID NO: 734 - protein, 64 aa, Homo sapiens [sequence omitted]

SEQ ID NO: 735 - protein, 70 aa, Homo sapiens; identical to SEQ ID NO: 263

SEQ ID NO: 736 - protein, 74 aa, Homo sapiens
MRQIAVFQRFMFPFLLPWLSCIFSSSQNSIYYVSTFIKCLALKSIIKRQRSEINSGFLAIYHALRNQVTRCGGL

SEQ ID NO: 737 - protein, 70 aa, Homo sapiens
MPRRTRGGLWLCNAHKSCQKYLSSLKLSTLLSPLLVLPFYTPSLKGWGIFVLRFYFMVIIADCNLFKIII

SEQ ID NO: 738 - protein, 52 aa, Homo sapiens [sequence omitted]

SEQ ID NO: 739 - protein, 70 aa, Homo sapiens [sequence omitted]

SEQ ID NO: 740 - protein, 103 aa, Homo sapiens
MTQVERVIVFLTLSTLSLAKTTQPIFMDSYEGQEVNITCSHNNIVTNDYITWYQQFPSQGPRFIIQGYQKKVTNEVAFLCIPADRKSITLNLPRVSLEDTGGK

SEQ ID NO: 741 - protein, 92 aa, Homo sapiens
MTKLAQWLWGLAILGSTWVALTTGALGLELPLSCQEVLWPLPAYLLVSAGCYALGTVGYRVATFHDCEDAARELQSQIQEARADLARRGLRF

SEQ ID NO: 742 - protein, 45 aa, Homo sapiens
MSVGLAGAVGRRCHLALAVLHDPLCHHGSLATICKQPEVCLFTIV

SEQ ID NO: 743 - protein, 82 aa, Homo sapiens
MPFLLNQCGSLLYYLTLASTDLTLAVPICNSLAIIFTLIVGKALGEDIGGKRAVAGMVLTVIGISLCITSSVSKTQGQQSTL

SEQ ID NO: 744 - protein, 82 aa, Homo sapiens; identical to SEQ ID NO: 743

SEQ ID NO: 745 - protein, 231 aa, Homo sapiens [sequence omitted]

SEQ ID NO: 746 - protein, 118 aa, Homo sapiens [sequence omitted]

SEQ ID NO: 747 - protein, 299 aa, Homo sapiens; identical to SEQ ID NO: 275

SEQ ID NO: 748 - protein, 299 aa, Homo sapiens; identical to SEQ ID NO: 275

SEQ ID NO: 749 - protein, 98 aa, Homo sapiens [sequence omitted]

SEQ ID NO: 750 - protein, 106 aa, Homo sapiens
MYTRELLAWIQGLYTWELLAWIQHLNTWELLPWIRRLNSWILLVCPKLLHLWVFGKTMEIFVLVKDMMPFLYKKELCLVPEVISLLIFSHLDTSKELSIYGLTQLI

SEQ ID NO: 751 - protein, 106 aa, Homo sapiens; identical to SEQ ID NO: 750

SEQ ID NO: 752 - protein, 301 aa, Homo sapiens
MFSHLPFDCVLLLLLLLLTRSSEVEYRAEVGQNAYLPCFYTPAAPGNLVPVCWGKGACPVFECGNVVLRTDERDVNYWTSRYWLNGDFRKGDVSLTIENVTLADSGIYCCRIQIPGIMNDEKFNLKLVIKPAKVTPAPTLQRDFTAAFPRMLTTRGHGPAETQTLGSLPDINLTQISTLANELRDSRLANDLRDSGATIRIGIYIGAGICAGLALALIFGALIFKWYSHSKEKIQNLSLISLANLPPSGLANAVAEGIRSEENIYTIEENVYEVEEPNEYYCYVSSRQQPSQPLGCRFAMP

SEQ ID NO: 753 - protein, 56 aa, Homo sapiens
MGGVAFLLWLTVFSAWTRLSIFSRLSDLPSFCLPLAGTVSSSLPEGSGCSFSSSTK

SEQ ID NO: 754 - protein, 112 aa, Homo sapiens
MCHWQNSFLCQSFLTFGSILALLAGKACYPESESIRELFMWALELYSLPFYLFFKLSPLNLPGKLGLIETLSTCWGQKLDPVLETLQRVRSMASLIANFFVPFIQKKGQLIT

SEQ ID NO: 755 - protein, 232 aa, Homo sapiens
MAWIPLFLGVLAYCTGSVASYELTQPPSVSVSPGQTASITCSGDNLGNKYVAWYQQKAGQSPVLVIYQDDKRPSEIPERFSGSNSGNTATLTISGTQAMDEADYYCQAWDSSTAVMFGGGTKLTVLGQPKAAPSVTLFPPSSEELQANKATLVCLISDFYPGAVTVAWKADSSPVKAGVETTTPSKQSNNKYAASSYLSLTPEQWKSHRSYSCQVTHEGSTVEKTVAPTECS

SEQ ID NO: 756 - protein, 47 aa, Homo sapiens
MGAGCTPVVLGAALWLWRWFSRWGLGGLCWRPCTCTPCHSASPGAGR

SEQ ID NO: 757 - protein, 47 aa, Homo sapiens; identical to SEQ ID NO: 285

SEQ ID NO: 758 - protein, 147 aa, Homo sapiens
MSITRLFPALLECFVIVLCGYIAGRANVITSTQAKGLGNFVSRFALPALLFKNMVVLNFSNVDWAFLYSILIAKASVFFIVCVLTLLVASPDSRFSKAGLFPIFATQSNDFALGYPIGKLIFIFQVFKKFNFNLFRHLLVTDSYSHI

SEQ ID NO: 759 - protein, 105 aa, Homo sapiens
MWLGQAFWAWLSFMNRWHSKFLMVRSRGECGAQRQLLCVFVFRDSLREGMPRRNMVSSEAHGCLLRTAVFYATYPCTSYAKETKPSACLFPLLIIGKWMLWSFKN

SEQ ID NO: 760 - protein, 114 aa, Homo sapiens; identical to SEQ ID NO: 288

SEQ ID NO: 761 - protein, 85 aa, Homo sapiens
MGWDSKLLFLFTCLSCVTTCSVSTCFQAPLGSSSFAPSGIHGTLEFPVVRGAHKNFLPMGPMYLFPITAGQPLTLFVKTQSAGRN

SEQ ID NO: 762 - protein, 96 aa, Homo sapiens
MCHVHCCWKFIVELLQCVIQGIRCLYFGNICNGTCFLESCFFGMSFQGANFLFFGNSHSSSFYCRRMSPFPRGEQVLHFICHSVCQCQCQCWCSGG

SEQ ID NO: 763 - protein, 116 aa, Homo sapiens
  misc_feature (1)...(116): Xaa = any amino acid or nothing
MLLWVFLQLNYKIQAIPTYETVMTFFKSFPENCCFLDRDIGQSLRPLFLCLRLHGITKGKDXEVLRHLNFFPESWLDQVTVNHYHALENGGDMVHLKDLNTQAVRFGLLFNQENTT

SEQ ID NO: 764 - protein, 289 aa, Homo sapiens
MLAMGALAGFWILCLLTYGYLSWGQALEEEEEGALLAQAGEKLEPSTTSTSQPHLIFILADDQGFRDVGYHGSEIKTPTLDKLAAEGVKLENYYVQPICTPSRSQFITGKYQIHTGLQHSIIRPTQPNCLPLDNATLPQKLKEVGYSTHMVGKWHLGFYRKECMPTRRGFDTFFGSLLGSGDYYTHYKCDSPGMCGYDLYENDNAAWDYDNGIYSTQMYTQRVQQILASHNPTKPIFLYIAYQAVHSPLQAPGRYFEHYRSIININRRRYAAMLSCLDEAINNVTLALK

SEQ ID NO: 765 - protein, 71 aa, Homo sapiens [sequence omitted]

SEQ ID NO: 766 - protein, 46 aa, Homo sapiens; identical to SEQ ID NO: 294

SEQ ID NO: 767 - protein, 117 aa, Homo sapiens; identical to SEQ ID NO: 295

SEQ ID NO: 768 - protein, 56 aa, Homo sapiens
MKNLLMVHLWGICTLYLEFSAVSAISFLNHISVKTYFPNSSSFYRATPMVLDFILH

SEQ ID NO: 769 - protein, 56 aa, Homo sapiens; identical to SEQ ID NO: 297

SEQ ID NO: 770 - protein, 57 aa, Homo sapiens
MRETGILLCFLSALNYITLVTSQKLILSKKMHVNHYLPKKTISKFLYFVKVFHDLVL

SEQ ID NO: 771 - protein, 73 aa, Homo sapiens
MKQLIYWFSLFFCCSCCHLNRHGNRLHTTEIFPSLFHLVCCADPLPWMPAHSFGSPFWSLFSTYPGRNSRGCQ

SEQ ID NO: 772 - protein, 71 aa, Homo sapiens [sequence omitted]

SEQ ID NO: 773 - protein, 62 aa, Homo sapiens
MQLKFSQLTTSSLSFSSALWLLAFSRVFLLADSNLFVKPSSDLGSDTCSADFCDFRKLSFFR

SEQ ID NO: 774 - protein, 429 aa, Homo sapiens; identical to SEQ ID NO: 302

SEQ ID NO: 775 - protein, 55 aa, Homo sapiens; identical to SEQ ID NO: 303

SEQ ID NO: 776 - protein, 48 aa, Homo sapiens; identical to SEQ ID NO: 304

SEQ ID NO: 777 - protein, 106 aa, Homo sapiens
MLATLACMAIPWTHLGCSCLLACLPFSHHLGLSEDIISSEKPSVTMLSKILQHFSHPLSHYSAFSETLVLPETYLFTCLASFLPHYHVSFLRVRDLVRDNHCILRV

SEQ ID NO: 778 - protein, 46 aa, Homo sapiens; identical to SEQ ID NO: 306

SEQ ID NO: 779 - protein, 69 aa, Homo sapiens; identical to SEQ ID NO: 307

SEQ ID NO: 780 - protein, 69 aa, Homo sapiens; identical to SEQ ID NO: 308

SEQ ID NO: 781 - protein, 68 aa, Homo sapiens
MARSARTFLLSSTWHLTKFPMSAGYFSPCSWLAAVIRLIQRVLMFFFFRYRALVHFTKARITVLTANL

SEQ ID NO: 782 - protein, 191 aa, Homo sapiens
MAGPELLLDSNIRLWVVLPIVIITFFVGMIRHYVSILLQSDKKLTQEQVSDSQVLIRSRVLRENGKYIPKQSFLTRKYYFNNPEDGFFKKTKRKVVPPSPMTDPTMLTDMMKGNVTNVLPMILIGGWINMTFSGFVTTKVPFPLTLRFKPMLQQGIELLTLDASWVSSASLGTSPMVFGLRSIYSSDSGPR

SEQ ID NO: 783 - protein, 51 aa, Homo sapiens
MLFVVLPLLIIVFNIPMREAVFDFLFMIKIIKVLKVFYCIACFIIKQALVF

SEQ ID NO: 784 - protein, 64 aa, Homo sapiens; identical to SEQ ID NO: 312

SEQ ID NO: 785 - protein, 58 aa, Homo sapiens
MAVPIMLFYFSLLYKSLAFFESYSFAEYHPPTSGRQGCVKDILKRLIWFLIHLHLDAG

SEQ ID NO: 786 - protein, 86 aa, Homo sapiens
MAVKNVALVITWAYGFVKVTLSLLVFCVYCMYVILHLRMYITHKGACRHMSASWLATNCLWPWGCHSTFHLEIENNNTIILLELCA

SEQ ID NO: 787 - protein, 66 aa, Homo sapiens
MFGVSGFCLLFTFLELVLLGLGRWWRTWKHKSSSSKYFLTSESTRRHKKATDSLPVVETKEQFQEA

SEQ ID NO: 788 - protein, 439 aa, Homo sapiens
MAAARCWRPLLRGPRLSLHTAANAAATATETTCQDVAATPVARYPPIVASMTADSKAARLRRIERWQATVHAAESVDEKLRILTKMQFMKYMVYPQTFALNADRWYQYFTKTVFLSGLPPPPAEPEPEPEPEPEPALDLAALRAVACDCLLQEHFYLRRRRRVHRYEESEVISLPFLDQLVSTLVGLLSPHNPALAAAALDYRCPVHFYWVRGEEIIPRGHRRGRIDDLRYQIDDKPNNQIRISKQLAEFVPLDYSVPIEIPTIKCKPDKLPLFKRQYENHIFVGSKTADPCCYGHTQFHLLPDKLRRERLLRQNCADQIEVVFRANAIASLFAWTGAQAMYQGFWSEADVTRPFVSQAVITDGKYFSFFCYQLNTLALTTQADQNNPRKNICWGTQSKPLYETIEDNDVKGFNDDVLLQIVHFLLNRPKEEKSQLLEN

SEQ ID NO: 789 - protein, 66 aa, Homo sapiens
MGLFAIHISSWLLRACFLIIENFESVLYISNTHPFIYMGLHRFFSQPSVWILLFLTGPLNTKSYYH

SEQ ID NO: 790 - protein, 76 aa, Homo sapiens; identical to SEQ ID NO: 318

SEQ ID NO: 791 - protein, 53 aa, Homo sapiens; identical to SEQ ID NO: 319

SEQ ID NO: 792 - protein, 51 aa, Homo sapiens
MYSLSLQLPVLCVLKSFKAYSLLWGVSTGVKEGFAGRTIVNHESYYLRIVW

SEQ ID NO: 793 - protein, 62 aa, Homo sapiens; identical to SEQ ID NO: 321

SEQ ID NO: 794 - protein, 50 aa, Homo sapiens
MFATTLGVMGLWSGIIICTVFQAVCFLGFIIQLNWKKACQQGALKTLKEF

SEQ ID NO: 795 - protein, 70 aa, Homo sapiens
MHLTLSLLLFSLHFPTYIIRVNFCLVSNLFQRMRSTKLLRLIDLDFSFTFSLLDLPPVNEYDMYIRNFGK

SEQ ID NO: 796 - protein, 157 aa, Homo sapiens
MVKSVIFLSFWQGMLLAILEKCGAIPKIHSARVSVGEGTVAAGYQDFIICGEMFFAALALRHAFTYKVYADKRLDAQGRCAPMKSISSSLKETMNPHDIVQDAIHNFSPAYQQYTQQSTLEPGPTWRGGAHGLSRSHSLSGARDNEKTLLLSSDDEF

SEQ ID NO: 797 - protein, 63 aa, Homo sapiens; identical to SEQ ID NO: 325

SEQ ID NO: 798 - protein, 89 aa, Homo sapiens
MVQLFIPILKFQLGYSVLSLCNHVLEFLFPSSLSGIFSSSLPLLLPFPLSLPSLPPSLFPSLRVLLCHPHWSVASNSWAVAILLPQPPE

SEQ ID NO: 799 - protein, 56 aa, Homo sapiens
MYLLILLSTKFSCISSLPGLDYRQDSMLCQGISLAPTLLIIHLFMCIMIKYKPLIR

SEQ ID NO: 800 - protein, 46 aa, Homo sapiens
MCVHPYVCTCACMHVCVCLCAWCLSQPGGLGGFSEEVTSLPRPRAL

SEQ ID NO: 801 - protein, 118 aa, Homo sapiens [sequence omitted]

SEQ ID NO: 802 - protein, 111 aa, Homo sapiens; identical to SEQ ID NO: 330

SEQ ID NO: 803 - protein, 318 aa, Homo sapiens; identical to SEQ ID NO: 331

SEQ ID NO: 804 - protein, 384 aa, Homo sapiens
MEFGLSWLFLVAILKGVQCEVQLVESGGGLVQPGGSLRLSCAASGFTFSSYAMSWVRQAPGKGLEWVSGLSGSGGSSTYYADSVKGRFTISRDNSKGTLYLQMNSLRADDTARYYCAKGGVELASTKPSSIWRLNPIRYWYFDLWGQGTLVTVSSGDGSSGGSGGASTGEIVLTQSPGTLSLSPGERATLSCRASQSVSSSYLAWYQQKPGQAPRLLIYGASSRATGIPDRFSGSGSGTDFTLTISRLEPEDFAVYYCQQYGSSPTTFGQGTKVDIKRTVAAPSVFIFPPSDEQLKSGTASVVCLLNNFYPREAKVQWKVDNALQSGNSQESVTEQDSKDSTYSLSSTLTLSKADYEKHKVYACEVTHQGLSSPVTKSFNRGEC

SEQ ID NO: 805 - protein, 384 aa, Homo sapiens; identical to SEQ ID NO: 804

SEQ ID NO: 806 - protein, 384 aa, Homo sapiens; identical to SEQ ID NO: 804

SEQ ID NO: 807 - protein, 384 aa, Homo sapiens; identical to SEQ ID NO: 804

SEQ ID NO: 808 - protein, 46 aa, Homo sapiens; identical to SEQ ID NO: 336

SEQ ID NO: 809 - protein, 76 aa, Homo sapiens
MQSVIRKQFTALAGFCFWFCLFTLAVLSLTLLICKLRIMPFKLEGLFQELNKSWHMKLLSQDRELINMLLLLMGRS

SEQ ID NO: 810 - protein, 1188 aa, Homo sapiens
MDLPRGLVVAWALSLWPGFTDTFNMDTRKPRVIPGSRTAFFGYTVQQHDISGNKWLVVGAPLETNGYQKTGDVYKCPVIHGNCTKLNLGRVTLSNVSERKDNMRLGLSLATNPKDNSFLACSPLWSHECGSSYYTTGMCSRVNSNFRFSKTVAPALQRCQTYMDIVIVLDGSNSIYPWVEVQHFLINILKKFYIGPGQIQVGVVQYGEDVVHEFHLNDYRSVKDVVEAASHIEQRGGTETRTAFGIEFARSEAFQKGGRKGAKKVMIVITDGESHDSPDLEKVIQQSERDNVTRYAVAVLGYYNRRGINPETFLNEIKYIASDPDDKHFFNVTDEAALKDIVDALGDRIFSLEGTNKNETSFGLEMSQTGFSSHVVEDGVLLGAVGAYDWNGAVLKETSAGKVIPLRESYLKEFPEELKNHGAYLGYTVTSVVSSRQGRVYVAGAPRFNHTGKVILFTMHNNRSLTIHQAMRGQQIGSYFGSEITSVDIDGDGVTDVLLVGAPMYFNEGRERGKVYVYELRQNRFVYNGTLKDSHSYQNARFGSSIASVRDLNQDSYNDVVVGAPLEDNHAGAIYIFHGFRGSILKTPKQRITASELATGLQYFGCSIHGQLDLNEDGLIDLAVGALGNAVILWSRPVVQINASLHFEPSKINIFHRDCKRSGRDATCLAAFLCFTPIFLAPHFQTTTVGIRYNATMDERRYTPRAHLDEGGDRFTNRAVLLSSGQELCERINFHVLDTADYVKPVTFSVEYSLEDPDHGPMLDDGWPTTLRVSVPFWNGCNEDEHCVPDLVLDARSDLPTAMEYCQRVLRKPAQDCSAYTLSFDTTVFIIESTRQRVAVEATLENRGENAYSTVLNISQSANLQFASLIQKEDSDGSIECVNEERRLQKQVCNVSYPFFRAKAKVAFRLDFEFSKSIFLHHLEIELAAGSDSNERDSTKEDNVAPLRFHLKYEVDVLFTRSSSLSHYEVKPNSSLERYDGIGPPFSCIFRIQNLGLFPIHGMMMKITIPIATRSGNRLLKLRDFLTDEANTSCNIWGNSTEYRPTPVEEDLRRAPQLNHSNSDVVSINCNIRLVPNQEINFHLLGNLWLRSLKALKYKSMKIMVNAALQRQFHSPFIFREEDPSRQIVFEISKQEDWQVPIWIIVGSTLGGLLLLALLVLALWKLGFFRSARRRREPGLDPTPKVLE

SEQ ID NO: 811 - protein, 52 aa, Homo sapiens; identical to SEQ ID NO: 339

SEQ ID NO: 812 - protein, 77 aa, Homo sapiens
MAIFPLWKGVNVLVCIFSSFIMLNIYCTLLIWKFIYSAFFCYITSLMIFPFSFFCSFFLDLLKVIVYIFFLYLYSSR

SEQ ID NO: 813 - protein, 48 aa, Homo sapiens; identical to SEQ ID NO: 341

SEQ ID NO: 814 - protein, 87 aa, Homo sapiens
MCLSHLVSLFPAATAFLINKVPLPVDKLAPLPLDNILPFMDPLKLLLKTLGISVEHLVEGLRKCVNELGPEASEAVKKLLEALSHLV

SEQ ID NO: 815 - protein, 236 aa, Homo sapiens
MAWIPLFLGVLAYCTGAVASYELTQPPSVSVSPGQTASITCSGDRLGDKIACWYQLKPGQSPLVVIHQDTKRPSGIPERFSGSNSGNTATLTISGTQAMDEADYYCQAWDSSSYVAFGGGTKLTVLGQPKAAPSVTLFPPSSEELQANKATLVCLISDFYPGVVTVAWKADSSPVKAGVETTTPSKQSNNKYAVSSYLSLTPEQWKSHRSYSCQVTHEGSTVEKTVAPTEYLLRVY

SEQ ID NO: 816 - protein, 513 aa, Homo sapiens
MPGLGRRAQWLCWWWGLLCSCCGPPPLRPPLPAAAAAAAGGQLLGDGGSPGRTEQPPPSPQSSSGFLYRRLKTQEKREMQKEILSVLGLPHRPRPLHGLQQPQPPALRQQEEQQQQQQLPRGEPPPGRLKSAPLFMLDLYNALSADNDEDGASEGERQQSWPHEAASSSQRRQPPPGAAHPLNRKSLLAPGSGSGGASPLTSAQDSAFLNDADMVMSFVNLVEYDKEFSPRQRHHKEFKFNLSQIPEGEVVTAAEFRIYKDCVMGSFKNQTFLISIYQVLQEHQHRDSDLFLLDTRVVWASKEGWLEFDITATSNLWVVTPQHNMGLQLSVVTRDGVHVHPRAAGLVGRDGPYDKQPFMVAFFKVSEVHVRTTRSASSRRRQQSRNRSTQSQDVARVSSASDYNSSELKTACRKHELYVSFQDLGWQDWIIAPKGYAANYCDGECSFPLNAHMNATNHAIVQTLVHLMNPEYVPKPCCAPTKLNAISVLYFDDNSNVILKKYRNMVVRACGCH

SEQ ID NO: 817 - protein, 311 aa, Homo sapiens
MGCRLLCCAVLCLLGAVPMETGVTQTPRHLVMGMTNKKSLKCEQHLGHNAMYWYKQSAKKPLELMFVYNFKEQTENNSVPSRFSPECPNSSHLFLHLHTLQPEDSALYLCASSQVGGYNEQFFGPGTRLTVLEDLKNVFPPEVAVFEPSEAEISHTQKATLVCLATGFYPDHVELSWWVNGKEVHSGVSTDPQPLKEQPALNDSRYCLSSRLRVSATFWQNPRNHFRCQVQFYGLSENDEWTQDRAKPVTQIVSAEAWGRADCGFTSESYQQGVLSATILYEILLGKATLYAVLVSALVLMAMVKRKDSRG

SEQ ID NO: 818 - protein, 105 aa, Homo sapiens [sequence omitted]

SEQ ID NO: 819 - protein, 74 aa, Homo sapiens
MVVGIVAAAALCILILLYAMYKYRNRDEGSYQVDETRNYISNSAQSNGTLMKEKQQSSKSGHKKQKNKDREYYV

SEQ ID NO: 820 - protein, 74 aa, Homo sapiens; identical to SEQ ID NO: 819

SEQ ID NO: 821 - protein, 47 aa, Homo sapiens; identical to SEQ ID NO: 349

SEQ ID NO: 822 - protein, 458 aa, Homo sapiens; identical to SEQ ID NO: 350

SEQ ID NO: 823 - protein, 66 aa, Homo sapiens
MKLVLLRKTSLSVFTTLFSVSSSQYPVLSTSICNTPVFSTLFLEACSVNPLPSTVFLVLLYSVACL

SEQ ID NO: 824 - protein, 168 aa, Homo sapiens
MIFVLGQAEGILIMLAMTALTVRRSEPSLSTCQQGEDPLDWTVSLLLMAGLCTFFSCILAVFFHTPYRRLQAESGEPPSTRNAVGSQTQGRVWTEGEARKGLGSWGPARRIPELHGEGGASLRGPQEGHGSPHPACHRATPRAQGPAATDAPFPPGQTRRQGPSVQVY

SEQ ID NO: 825 - protein, 63 aa, Homo sapiens [sequence omitted]

SEQ ID NO: 826 - protein, 46 aa, Homo sapiens
MLLCLHLIIICLVFCIISAIPWVLNQCLIFRLYFLCQKKLAMSLEN

SEQ ID NO: 827 - protein, 58 aa, Homo sapiens
MLIGSGYLCFCALQWTELGNVCVCAHICRCTHMQVSGITSPVHVHIHRVLSCLIHFTS

SEQ ID NO: 828 - protein, 71 aa, Homo sapiens; identical to SEQ ID NO: 356

SEQ ID NO: 829 - protein, 311 aa, Homo sapiens
MLLLLLLLGLAGSGLGAVVSQHPSWVICKSGTSVKIECRSLDFQATTMFWYRQFPKQSLMLMATSNEGSKATYEQGVEKDKFLINHASLTLSTLTVTSAHPEDSSFYICSAGADSGTQETQYFGPGTRLTVLEDLKNVFPPEVAVFEPSEAEISHTQKATLVCLATGFYPDHVELSWWVNGKEVHSGVSTDPQPLKEQPALNDSRYCLSSRLRVSATFWQNPRNHFRCQVQFYGLSENDEWTQDRAKPVTQIVSAEAWGRADCGFTSESYQQGVLSATILYEILLGKATLYAVLVSALVLMAMVKRKDSRG

SEQ ID NO: 830 - protein, 52 aa, Homo sapiens; identical to SEQ ID NO: 358

SEQ ID NO: 831 - protein, 66 aa, Homo sapiens
MSSPCFQCFHLCCTIKVWPLCHHLQKAFPDFSIHVFSESDLSSFCEVQLLKICLQKYFLGSLMHCS

SEQ ID NO: 832 - protein, 63 aa, Homo sapiens
MIKLCHQLYNVYVCFFHLIVLGDIAIDYIIVPNISYLSISIPFVVTNIRGRDIFHPCNVALVM

SEQ ID NO: 833 - protein, 46 aa, Homo sapiens
MFYENKRREYLQDMLLSYRLLVAILVLLKKLTELNTITLICKSIIF

SEQ ID NO: 834 - protein, 51 aa, Homo sapiens; identical to SEQ ID NO: 362

SEQ ID NO: 835 - protein, 60 aa, Homo sapiens; identical to SEQ ID NO: 363

SEQ ID NO: 836 - protein, 88 aa, Homo sapiens; identical to SEQ ID NO: 364

SEQ ID NO: 837 - protein, 45 aa, Homo sapiens
MLYLLLFPGVSYLRSLFLGRPIGPGITSDFTLILFSNLLDSWPLS

SEQ ID NO: 838 - protein, 56 aa, Homo sapiens; identical to SEQ ID NO: 366

SEQ ID NO: 839 - protein, 55 aa, Homo sapiens [sequence omitted]

SEQ ID NO: 840 - protein, 48 aa, Homo sapiens; identical to SEQ ID NO: 368

SEQ ID NO: 841 - protein, 71 aa, Homo sapiens; identical to SEQ ID NO: 369

SEQ ID NO: 842 - protein, 79 aa, Homo sapiens
MNLKRLLLFLAKMFSAIFSLPTHPSHFPISIYDNIGHWPQSPKVRRKEGNEYLLNPNMCQTLDLTLLGIGDYLTSITSP

SEQ ID NO: 843 - protein, 90 aa, Homo sapiens [sequence omitted]

SEQ ID NO: 844 - protein, 46 aa, Homo sapiens
MFLLDLCLGSLSVFIDTHPCMHGGFKCSQDWCSPAKLLLSAFTKTR

SEQ ID NO: 845 - protein, 58 aa, Homo sapiens; identical to SEQ ID NO: 373

SEQ ID NO: 846 - protein, 235 aa, Homo sapiens
MRPLAGGLLKVVFVVFASLCAWYSGYLLAELIPDAPLSSAAYSIRSIGERPVLKAPVPKRQKCDHWTPCPSDTYAYRLLSGGGRSKYAKICFEDNLLMGEQLGNVARGINIAIVNYVTGNVTATRCFDMYEGDNSGPMTKFIQSAAPKSLLFMVTYDDGSTRLNNDAKNAIEALGSKEIRNMKFRSSWVFIAAKGLELPSEIQREKINHSDAKNNRYSGWPAEIQIEGCIPKERS

SEQ ID NO: 847 - protein, 65 aa, Homo sapiens
MLPFCHLWVPVTLVAAGAAQPAASMVMFPHLPALHHHCPHSHRTSQYMPASDGPQAYPDYADQST

SEQ ID NO: 848 - protein, 69 aa, Homo sapiens
MNPCFCGFLVLLSCCLSLLDSQLHNLIALQITCFKDVEIPNFFCDPSQLPHHACCDTFTNNIVMYFPAA

SEQ ID NO: 849 - protein, 406 aa, Homo sapiens; identical to SEQ ID NO: 377

SEQ ID NO: 850 - protein, 72 aa, Homo sapiens; identical to SEQ ID NO: 378

SEQ ID NO: 851 - protein, 73 aa, Homo sapiens; identical to SEQ ID NO: 379

SEQ ID NO: 852 - protein, 92 aa, Homo sapiens; identical to SEQ ID NO: 380

SEQ ID NO: 853 - protein, 266 aa, Homo sapiens [sequence omitted]

SEQ ID NO: 854 - protein, 326 aa, Homo sapiens; identical to SEQ ID NO: 382

SEQ ID NO: 855 - protein, 70 aa, Homo sapiens; identical to SEQ ID NO: 383

SEQ ID NO: 856 - protein, 289 aa, Homo sapiens [sequence omitted]

SEQ ID NO: 857 - protein, 50 aa, Homo sapiens
MKSSNIFSLFLFLVTFIFLTSIASILFSSWCPFSLIKCNQDLYYSGNGAS

SEQ ID NO: 858 - protein, 45 aa, Homo sapiens; identical to SEQ ID NO: 386

SEQ ID NO: 859 - protein, 69 aa, Homo sapiens
MFWTLVQGMSLLCLTDVFQALPSICIANSEIYYTVLTLMQFNCLWMVLSGKKVIFSSELMVRKGRRSWK

SEQ ID NO: 860 - protein, 48 aa, Homo sapiens; identical to SEQ ID NO: 388

SEQ ID NO: 861 - protein, 49 aa, Homo sapiens [sequence omitted]

SEQ ID NO: 862 - protein, 236 aa, Homo sapiens
MTAEFLSLLCLGLCLGYEDEKKNEKPPKPSLHAWPSSVVEAESNVTLKCQAHSQNVTFVLRKVNDSGYKQEQSSAENEAEFPFTDLKPKDAGRYFCAYKTTASHEWSESSEHLQLVVTDKHDELEAPSMKTDTRTIFVAIFSCISILLLFLSVFIIYRCSQHSSSSEESTKRTSHSKLPEQEAAEADLSNMERVSLSTADPQGVTYAELSTSALSEAASDTTQEPPGSHEYAALKV

SEQ ID NO: 863 - protein, 305 aa, Homo sapiens
MPLLTLYLLLFWLSGYSIATQITGPTTVNGLERGSLTVQCVYRSGWETYLKWWCRGAIWRDCKILVKTSGSEQEVKRDRVSIKDNQKNRTFTVTMEDLMKTDADTYWCGIEKTGNDLGVTVQVTIDPASTPAPTTPTSTTFTAPVTQEETSSSPTLTGHHLDNRHKLLKLSVLLPLIFTILLLLLVAASLLAWRMMKYQQKAAGMSPEQVLQPLEGDLCYADLTLQLAGTSPQKATTKLSSAQVDQVEVEYVTMASLPKEDISYASLTLGAEDQEPTYCNMGHLSSHLPGRGPEEPTEYSTISRP

SEQ ID NO: 864 - protein, 123 aa, Homo sapiens; identical to SEQ ID NO: 392

SEQ ID NO: 865 - protein, 45 aa, Homo sapiens [sequence omitted]

SEQ ID NO: 866 - protein, 188 aa, Homo sapiens
MDWTWRFLFVVAAATGVQSQVQLVQSGAEVKKPGSSVKVSCKASGGTFSTYAISWVRQAPGQGLEWMGGIIPIFGTANYAQKFQGRVTITADESTSTAYMELSSLRSEDTAVYYCARVWGGSGSYYSIVSTIGATTTVWMSGAREPWSPSPQPPPRAHRSSPWHPPPRAPLGAQRPWAAWSRTTSPNR

SEQ ID NO: 867 - protein, 188 aa, Homo sapiens; identical to SEQ ID NO: 866

SEQ ID NO: 868 - protein, 275 aa, Homo sapiens
MACPGFLWALVISTCLEFSMAQTVTQSQPEMSVQEAETVTLSCTYDTSESDYYLFWYKQPPSRQMILVIRQEAYKQQNATENRFSVNFQKAAKSFSLKISDSQLGDAAMYFCAYRSGRDDKIIFGKGTRLHILPNIQNPDPAVYQLRDSKSSDKSVCLFTDFDSQTNVSQSKDSDVYITDKTVLDMRSMDFKSNSAVAWSNKSDFACANAFNNSIIPEDTFFPSPESSCDVKLVEKSFETDTNLNFQNLSVIGFRILLLKVAGFNLLMTLRLWSS

SEQ ID NO: 869 - protein, 48 aa, Homo sapiens; identical to SEQ ID NO: 397

SEQ ID NO: 870 - protein, 97 aa, Homo sapiens
MEFLGPCGLRLVGARPLLPYWLLVFLAALNALLQWLLRPLVLYAPLLNPYTLAVANTTFTVSTDKAQRHFGYEPPFSWEDSRTRTILWVQAATGSAQ

SEQ ID NO: 871 - protein, 258 aa, Homo sapiens [sequence omitted]

SEQ ID NO: 872 - protein, 463 aa, Homo sapiens
MLLLLLPLLWGRERAEGQTSKLLTMQSSVTVQEGLCVHVPCSFSYPSHGWIYPGPVVHGYWFREGANTDQDAPVATNNPARAVWEETRDRFHLLGDPHTENCTLSIRDARRSDAGRYFFRMEKGSIKWNYKHHRLSVNVTALTHRPNILIPGTLESGCPQNLTCSVPWACEQGTPPMISWIGTSVSPLDPSTTRSSVLTLIPQPQDHGTSLTCQVTFPGASVTTNKTVHLNVSYPPQNLTMTVFQGDGTVSTVLGNGSSLSLPEGQSLRLVCAVDAVDSNPPARLSLSWRGLTLCPSQPSNPGVLELPWVHLRDEDEFTCRAQNPLGSQQVYLNVSLQSKATSGVTQGAVGGAGATALVFLSFCVIFVVVRSCRKKSARPAAGVGDTGIEDANAVRGSASQGPLTEPWAEDSPPDQPPPASARSSVGEGELQYASLSFQMVKPWDSRGQEATDTEYSEIKIHR

SEQ ID NO: 873 - protein, 58 aa, Homo sapiens; identical to SEQ ID NO: 401

SEQ ID NO: 874 - protein, 70 aa, Homo sapiens; identical to SEQ ID NO: 402

SEQ ID NO: 875 - protein, 239 aa, Homo sapiens
MRSSLTMVGTLWAFLSLVTAVTSSTSYFLPYWLFGSQMGKPVSFSTFRRCNYPVRGEGHSLIMVEECGRYASFNAIPSLAWQMCTVVTGAGCALLLLVALAAVLGCCMEELISRMMGRCMGAAQFVGGLLISSGCALYPLGWNSPEIMQTCGNVSNQFQLGTCRLGWAYYCAGGGAAAAMLICTWLSCFAGRNPKPVILGGKHHEENHFLCYGAWPLPSTLELRKEDRGGRATGKQVTP

SEQ ID NO: 876 - protein, 239 aa, Homo sapiens; identical to SEQ ID NO: 875

SEQ ID NO: 877 - protein, 524 aa, Homo sapiens [sequence omitted]

SEQ ID NO: 878 - protein, 524 aa, Homo sapiens [sequence omitted]

SEQ ID NO: 879 - protein, 524 aa, Homo sapiens [sequence omitted]

SEQ ID NO: 880 - protein, 199 aa, Homo sapiens
MRLSLPLLLLLLGAWAIPGGLGVMAPLTATAPEVDDEEMYSAHMPAHLRCDACRAVAYQECGPKTLAKAETKLHTSNSGGRRDVSELVYTDVLDRSCSRNWQDYGVREVDQVKRLTGPGLSEGPEPSISVMVTGGPWHTRLSRTCLHYLGEFGEDQIYEAHQQGRGALEALLCGGPPGGLLREGVSHKRRALVLDSTLL

SEQ ID NO: 881 - protein, 146 aa, Homo sapiens
MTLRPSLLPLHLLLLLLLSAAVCRAEAGLETESPVRTLQVETLVEPPEPCAEPAAFGDTLHIHYTGSLVDGRIIDTSLTRDPLVIELGQKQVIPGLEQSLLDMCVGEKRRAIIPSHLAYGKRGFPPSVPGTKDNLMRPPGMTSSSQ

SEQ ID NO: 882 - protein, 366 aa, Homo sapiens; identical to SEQ ID NO: 410

SEQ ID NO: 883 - protein, 57 aa, Homo sapiens
MVKRKSWTKWCGWLTVVRFLARGFEMHLKSCSRLLFSELAAFAFFEFSLKTVTLRAF

SEQ ID NO: 884 - protein, 53 aa, Homo sapiens; identical to SEQ ID NO: 412

SEQ ID NO: 885 - protein, 102 aa, Homo sapiens
MKEALLKCSRLARGLLLCLDCANDHRSPVERNAQTTLILHSSLYSLSLGNQLQGGGEMATTGGSTQQAKTYGGLFQIGAMEPALFLLFIFLLASFWVHRAIE

SEQ ID NO: 886 - protein, 47 aa, Homo sapiens; identical to SEQ ID NO: 414

SEQ ID NO: 887 - protein, 46 aa, Homo sapiens; identical to SEQ ID NO: 415

SEQ ID NO: 888 - protein, 62 aa, Homo sapiens
MVYLPVSLNGLRLACFSYVLAPIKVKPGGGSETRDGFRIPESTPSLKAGYCDHKHFLPTIHL

SEQ ID NO: 889 - protein, 54 aa, Homo sapiens; identical to SEQ ID NO: 417

SEQ ID NO: 890 - protein, 181 aa, Homo sapiens
MHFPVNCFFKSLHIFLLLQVFLATFLRKKLSKVAFSCLVEFFYYCYYFLDFASSVSFLFCFVLLLRQSLTLSPRLECSDTILAHCNLRLPGSRYSSASTSRVAGITGVHHHTYVNFVWTVQKAVHCVGQASWELLTSRDPPTLASHRAGITGMSHRTWAKVFLKRVIFLNREYDLTMFCFL

SEQ ID NO: 891 - protein, 66 aa, Homo sapiens
MLVPTFLSLVCDFSLFVLLLLGCLSFLLPPHLPCTSFPLHLWRLLSPFISFLDLLLLLSYKMNCII

SEQ ID NO: 892 - protein, 74 aa, Homo sapiens; identical to SEQ ID NO: 420

SEQ ID NO: 893 - protein, 78 aa, Homo sapiens; identical to SEQ ID NO: 421

SEQ ID NO: 894 - protein, 79 aa, Homo sapiens
MCCELLAVVIATLIIKIGLVVLLYFIKLLIHIEFIKRHSILKCESIFNLNVGIRMYPGQVNFCETLQMLDGFGRIFQTK

SEQ ID NO: 895 - protein, 859 aa, Homo sapiens
MACRWSTKESPRWRSALLLLFLAGVYGNGALAEHSENVHISGVSTACGETPEQIRAPSGIITSPGWPSEYPAKINCSWFIRANPGEIITISFQDFDIQGSRRCNLDWLTIETYKNIESYRACGSTIPPPYISSQDHIWIRFHSDDNISRKGFRLAYFSGKSEEPNCACDQFRCGNGKCIPEAWKCNNMDECGDRSDEEICAKEANPPTAAAFQPCAYNQFQCLSRFTKVYTCLPESLKCDGNIDCLDLGDEIDCDVPTCGQWLKYFYGTFNSPNYPDFYPPGSNCTWLIDTGDHRKVILRFTDFKLDGTGYGDYVKIYDGLEENPHKLLRVLTAFDSHAPLTVVSSSGQIRVHFCADKVNAARGFNATYQVDGFCLPWEIPCGGNWGCYTEQQRCDGYWHCPNGRDETNCTMCQKEEFPCSRNGVCYPRSDRCNYQNHCPNGSDEKNCFFCQPGNFHCKNNRCVFESWVCDSQDDCGDGSDEENCPVIVPTRVITAAVIGSLICGLLLVIALGCTCKLYSLRMFERRSFETQLSRVEAELLRREAPPSYGQLIAQGLIPPVEDFPVCSPNQASVLENLRLAVRSQLGFTSVRLPMAGRSSNIWNRIFNFARSRHSGSLALVSADGDEVVPSQSTSREPERNHTHRSLFSVESDDTDTENERRDMAGASGGVAAPLPQKVPPTTAVEATVGACASSSTQSTRGGHADNGRDVTSVEPPSVSPARHQLTSALSRMTQGLRWVRFTLGRSSSLSQNQSPLRQLDNGVSGREDDDDVEMLIPISDGSSDFDVNDCSRPLLDLASDQGQGLRQPYNATNPGVRPSNRDGPCERCGIVHTAQIPDTCLEVTLKNETSDDEALLLC

SEQ ID NO: 896 - protein, 53 aa, Homo sapiens
MSNRTRIRTHVNLCCFCRYTTPKMSFSSACVSLCLMLLFCSPPLLLLLLSSFV

SEQ ID NO: 897 - protein, 366 aa, Homo sapiens
MASMAAVLTWALALLSAFSATQARKGFWDYFSQTSGDKGRVEQIHQQKMAREPATLKDSLEQDLNNMNKFLEKLRPLSGSEAPRLPQDPVGMRRQLQEELEEVKARLQPYMAEAHELVGWNLEGLRQQLKPYTMDLMEQVALRVQELQEQLRVVGEDTKAQLLGGVDEAWALLQGLQSRVVHHTGRFKELFHPYAESLVSGIGRHVQELHRSVAPHAPASPARLSRCVQVLSRKLTLKAKALHARIQQNLDQLREELSRAFAGTGTEEGAGPDPQMLSEEVRQRLQAFRQDTYLQIAAFTRAIDQETEEVQQQLAPPPPGHSAFAPEFQQTDSGKVLSKLQARLDDLWEDITHSLHDQGHSHLGDP

SEQ ID NO: 898 - protein, 47 aa, Homo sapiens; identical to SEQ ID NO: 426

SEQ ID NO: 899 - protein, 367 aa, Homo sapiens
MEFGLSWLFLVAILKGVQCEVQLVESGGGLVQPGGSLRLSCAASGFTFSSYAMSWVRQAPGKGLEWVSGFTGSGGSGGSTYYADSVKGRFTISRDNSKNTLFLQMNSLRAEDTAVYYCAKGLLPPRWAYRVYEDSGIFFDYWGQGTLVTVSSSDIQMTQSPSTLSASVGDRVTITCRASQSISSWLAWYQQKPGKAPKLLIYKASSLQSGVPSRFSGSGSGTDFTLTISSLQPDDFATYYCQQLSTYVWTFGQGTKVDIKRTVAAPSVFIFPPSDEQLKSGTASVVCLLNNFYPREAKVQWKVDNALQSGNSQESVTEQDSKDSTYSLSSTLTLSKADYEKHKVYACEVTHQGLSSPVTKSFNRGEC

SEQ ID NO: 900 - protein, 55 aa, Homo sapiens
MLCGNTQLLFTVAIILLYVTCLLHWTFLHLEWRVSEGRHHDPLSTTLMHEKMNDN

SEQ ID NO: 901 - protein, 212 aa, Homo sapiens; identical to SEQ ID NO: 429

SEQ ID NO: 902 - protein, 69 aa, Homo sapiens
MIELAFASFLKCASFSLLILFSFSFPLWFFLSCFACSYSFSCLLSRISILSPFCHLLPRQSHDLCTNDL

SEQ ID NO: 903 - protein, 62 aa, Homo sapiens; identical to SEQ ID NO: 431

SEQ ID NO: 904 - protein, 318 aa, Homo sapiens; identical to SEQ ID NO: 432

SEQ ID NO: 905 - protein, 56 aa, Homo sapiens; identical to SEQ ID NO: 433

SEQ ID NO: 906 - protein, 83 aa, Homo sapiens
MHVLIRTPCSLILCLANSSHASLPGFSASSFLFKESCRLLLNSSFLLHGLEILSGAIAGQCNSFCLFSISQGSLSFNASCPLP

SEQ ID NO: 907 - protein, 71 aa, Homo sapiens
MTLLWPHTAACLSVTLYLPASSAKYFKRGEGREKFITNPTTRKKKLFWRRGKRNHDQAFTGIPDQVSLFPF

SEQ ID NO: 908 - protein, 97 aa, Homo sapiens
MYLHVLVLSHRILLSPYIPSFKSVPPPVFSILQMAPMSILDIDHPRSLGGDSSHFFSSVAQALTFCPFALRPFNNYSLQRPVFQKAPAFHHFLVKKF

SEQ ID NO: 909 - protein, 90 aa, Homo sapiens; identical to SEQ ID NO: 437

SEQ ID NO: 910 - protein, 58 aa, Homo sapiens
MQLWGFLNLNFPCSSLCFWALGSRGFTLVLAVTPINSTGWAAHLPQHVKMRLFSIQLF

SEQ ID NO: 911 - protein, 73 aa, Homo sapiens
MLMVLKLVICSIFIGKEGHFVISYLPSFSLNIQDTLKSVHQPCSALSGYNMPEKPEECSIKERHPYSQRLFLE

SEQ ID NO: 912 - protein, 96 aa, Homo sapiens; identical to SEQ ID NO: 440

SEQ ID NO: 913 - protein, 45 aa, Homo sapiens; identical to SEQ ID NO: 441

SEQ ID NO: 914 - protein, 78 aa, Homo sapiens [sequence omitted]

SEQ ID NO: 915 - protein, 87 aa, Homo sapiens
MWLFCAWVSTWGQGCPPGRGQMIYASHHLSVHTTSPHHWLSAWALQGGAVFPELAHGASSASSGQADDSTCSFCSPWRVSAEHKSLT

SEQ ID NO: 916 - protein, 368 aa, Homo sapiens
MWPALLLSHLLPLWPLLLLPLPPPAQDSSSSPRTPPAPARPPCARGGPSAPRHVCVWERAPPPSRSPRVPRSRRQVLPGTAPPATPSGFEEGPPSSQYPWAIVWGPTVSREDGGDPNSANPGFLDYGFAAPHGLATPHPNSDSMRGDGDGLILGEAPATLRPFLFGGRGEGVDPQLYVTITISIIIVLVATGIIFKFCWDRSQKRRRPSGQQGALRQEESQQPLTDLSPAGVTVLGAFGDSPTPTPDHEEPRGGPRPGMPHPKGAPAFQLNRSLSGQRFLHTLPLMCVSRPDVVVVCGVLTLSLMNTHPPRFRSPCMLLQRWVGGELGAPWALIGHGLVPFHTICFSVSPSYSKDAGITLRAPPWEMG

SEQ ID NO: 917 - protein, 344 aa, Homo sapiens
MDFLVLFLFYLASVLMGLVLICVCSKTHSLKGLARGGAQIFSCIIPECLQRAMHGLLHYLFHTRNHTFIVLHLVLQGMVYTEYTWEVFGYCQELELSLHYLLLPYLLLGVNLFFFTLTCGTNPGIITKANELLFLHVYEFDEVMFPKNVRCSTCDLRKPARSKHCSVCNWCVHRFDHHCVWVNNCIGAWNIRYFLIYVLTLTASAATVAIVSTTFLVHLVVMSDLYQETYIDDLGHLHVMDTVFLIQYLFLTFPRIVFMLGFVVVLSFLLGGYLLFVLYLAATNQTTNEWYRGDWAWCQRCPLVAWPPSAEPQVHRNIHSHGLRSNLQEIFLPAFPCHERKKQE

SEQ ID NO: 918 - protein, 95 aa, Homo sapiens
MELVLVFLCSLLAPMVLASAAEKEKEMDPFHYDYQTLRIGGLVFAVVLFSVGILLILSRRCKCSFNQKPRAPGDEEAQVENLITANATEPQKAEN

SEQ ID NO: 919 - protein, 50 aa, Homo sapiens
MGRRKFLPPPLLSLLSSSLPLPICHPPAPLTPGLGIPPCGVVGREVFSVL

SEQ ID NO: 920 - protein, 98 aa, Homo sapiens
MRAVLLQHLFILLDRQTTKKNSNLDIGHVFREALIFLADLKSQLPSVTHHQYRHLPSNWLQLLQCGQDKHCCLSHARLGLAQDIHSQNGLRDALMLDF

SEQ ID NO: 921 - protein, 98 aa, Homo sapiens; identical to SEQ ID NO: 920

SEQ ID NO: 922 - protein, 352 aa, Homo sapiens; identical to SEQ ID NO: 450

SEQ ID NO: 923 - protein, 456 aa, Homo sapiens; identical to SEQ ID NO: 451

SEQ ID NO: 924 - protein, 467 aa, Homo sapiens; identical to SEQ ID NO: 452

SEQ ID NO: 925 - protein, 467 aa, Homo sapiens; identical to SEQ ID NO: 452

SEQ ID NO: 926 - protein, 79 aa, Homo sapiens
MRMLLTLGGLPQMCLKFHGTPLTCPQGVPCPHDSQRIQGIPKAPTGREFLAGPQRVPFPWLRSPAHVRGQPSPGGPTPG

SEQ ID NO: 927 - protein, 85 aa, Homo sapiens
MLCWKTTSGRLKDILAILLTDVLLLLQEKDQKYVFASVDSKPPVISLQKLIVREVANEEKAMFMISASLQGPECIAAAREDPSKQ

SEQ ID NO: 928 - protein, 69 aa, Homo sapiens
MQQPEVKTWGGVVTAAMVIALAVYMGTGICGFLTFGAAVDPDVLLSYPSEDMAVAVARALIILSVLTCI

SEQ ID NO: 929 - protein, 46 aa, Homo sapiens
MQMWWLGAQSAGRCWLRARTATSWWTCSWKRLVRGCCGRKTSSLVW

SEQ ID NO: 930 - protein, 49 aa, Homo sapiens
MRNLSQRVTFRMVFAACSRYSRNMQPCCVLIFLKILLCLFYQSVGQFAN

SEQ ID NO: 931 - protein, 96 aa, Homo sapiens
MSLCLAFLLHWGHFRTCPLSHVEMHLYPKRCPQRNAESRWSPALVHCSRHIVQVSPSSSSIEAEGSRGSDFWGDGCLGRVLPPSIHVTSCSAETPA

SEQ ID NO: 932 - protein, 188 aa, Homo sapiens; identical to SEQ ID NO: 460

SEQ ID NO: 933 - protein, 62 aa, Homo sapiens
MACCLPCRAFPAYPTGVWPTTWLWCWAVLPIPWPASWPWVCCAGPWQGWAASLCWACSVGAT

SEQ ID NO: 934 - protein, 99 aa, Homo sapiens [sequence omitted]

SEQ ID NO: 935 - protein, 85 aa, Homo sapiens; identical to SEQ ID NO: 463

SEQ ID NO: 936 - protein, 343 aa, Homo sapiens
MWAAAGGLWRSRAGLRALFRSRDAALFPGCERGLHCSAVSCKNWLKKFASKTKKKVWYESPSLGSHSTYKPSKLEFLMRSTSKKTRKEDHARLRALNGLLYKALTDLLCTPEVSQELYDLNVELSKVSLTPDFSACRAYWKTTLSAEQNAHMEAVLQRSAAHMRHLLMSQQTLRNVPPIVFVQDKGNAALAELDQLLAVADFGPRDERDNFVQNDFRDPDAPQPCGTTEPTTSSSLCGIDHEALNKQIMEYKRRKDKGLGGLVWQGQVAELTTQMQKGRKRAKPRLEQDSSLKSYLSGEEVEDDLDLVGAPEYECYAPDTEELEAERGGGRTEDGHSCGASRE

SEQ ID NO: 937 - protein, 57 aa, Homo sapiens
MTAQHHSIAVLLLNLEVTCECMEYNKVFYSGSFASTSFLIGYCSSSSGFYFVQPSRP

SEQ ID NO: 938 - protein, 77 aa, Homo sapiens
MLAHLSFERSLILHLIFSGIAVSIKALTKTWMPPEMGSSPVYKAFSLLQCRLSAQKWGSCHSQNTLHWPVWGPQTTL

SEQ ID NO: 939 - protein, 104 aa, Homo sapiens
MALLHICVGHPLLSFPKAGDFSFSSQDDPSELTAGAKDKEFSCLLVICLQPAPSTRSLFSWQLFLLSFSLVSFTLIYRGEFKKSGEAKDYLTQVQGPIDCGKLL

SEQ ID NO: 940 - protein, 91 aa, Homo sapiens; identical to SEQ ID NO: 468

SEQ ID NO: 941 - protein, 78 aa, Homo sapiens [sequence omitted]

SEQ ID NO: 942 - protein, 112 aa, Homo sapiens [sequence omitted]

SEQ ID NO: 943 - protein, 200 aa, Homo sapiens
MQGMKTQLIQLSTLLRLLDSGFCSYLESQDSGYLYFCFRWLLIRFKREFSFLDILRLWEVMWTELPCTNFHLLLCCAILESEKQQIMEKHYGFNEILKHINELSMKIDVEDILCKAEAISLQMVKCKELPQAVCEILGLQGSEVTTPDSDVGEDENVVMTPCPTSAFQSNALPTLSASGARNDSPTQIPVSSDVCRLTPA

SEQ ID NO: 944 - protein, 98 aa, Homo sapiens
MGASLALGFTEVVLVLGFTVKLGAHLTLLPPLGGHLSPYCAAQAWEGVKQLMCNCSSYPLQCIICCIYATPGCYNLSFGILSSCEGIFVYEWLFEMLL
